(19) United States
(12) Patent Application Publication
(10) Pub. No.: US 2004/0101818 A1
(43) Pub. Date: May 27, 2004

(54) Gene expression profiles associated with osteoblast differentiation

(76) Inventors: Darren Ji, Cincinnati, OH (US); Douglas W. Axelrod, Cincinnati, OH (US); Jonathan S. Cook, Cincinnati, OH (US); Neelam Jaiswal, Cincinnati, OH (US); Richard Einstein, Gaithersburg, MD (US); Adam Houghton, Cincinnati, OH (US); Lawrence Mertz, Gaithersburg, MD (US)

Correspondence Address: MORGAN LEWIS & BOCKIUS LLP, 1111 PENNSYLVANIA AVENUE NW, WASHINGTON, DC, 20004, US

(21) Appl. No.: 10/450,826

(22) PCT Filed: Dec. 18, 2001
(86) PCT No.: PCT/US01/48276

(51) Int. Cl. C12Q 1/68; C12Q 1/00

(52) U.S. Cl. 435/4; 435/6

(57) ABSTRACT

The present invention identifies genes whose expression pattern is altered when precursor stem cells undergo differentiation into osteoblasts. The genes identified may be used as markers for the differentiation process. The present invention also provides methods to screen agents that are capable of modulating the differentiation process. The present invention also provides methods of identifying therapeutic agents that stimulate bone information by analyzing the expression of one or more of the genes identified.

### RELATED APPLICATONS

[0001] This application claims the benefit of U.S. Provisional Applications 60/255,882 (filed Dec. 18, 2000) and 60/285,691 (filed Apr. 24, 2001), all of which are herein incorporated by reference in their entirety.

### BACKGROUND OF THE INVENTION

[0002] Bone is a dynamic tissue in which old tissue is broken down and new tissue is synthesized. Control of the rate of breakdown and synthesis of new bone tissue is critical to the integrity of the skeletal structure. When the rates become unbalanced, serious conditions may result.

[0003] The process of synthesizing new bone tissue is mediated by osteoblasts. During the process of synthesizing new bone tissue, osteoblasts differentiate from precursor stem cells to mature bone-forming cells. During this differentiation, numerous genes undergo changes in expression levels. The expression levels of various enzymes and structural proteins, for example alkaline phosphatase and Type-1 collagen, are up-regulated while other genes are down-regulated.

[0004] In order to treat a condition characterized by an imbalance in the rates of breakdown and synthesis of bone tissue, it may be desirable to increase or decrease the rate of break down and/or synthesis. Thus, in a number of clinical applications, it may desirable to enhance the rate of bone formation by promoting the differentiation of precursor stem cells into osteoblasts. One application which is particularly important is the treatment of osteoporosis which is characterized by a decrease in bone mass making the bones more fragile and subject to fracture. Other potential uses for reagents capable of affecting the synthesis of bone tissue include the healing of broken bones, recovery after surgical procedures involving bones and the like.

[0005] While the changes in the expression levels of a number of individual genes have been identified, the investigation of the global changes in gene expression which occur in precursor stem cells as they differentiate into osteoblasts has not been reported. Such information would be useful, for example, in assessing the effects of a course of treatment designed to change the rate of formation of bone tissue. Accordingly, there exists a need for the investigation of the changes in global gene expression levels as well as the need for the identification of new molecular markers associated with the differentiation of precursor stem cells into osteoblasts. Furthermore, identification of additional genes involved in differentiation may allow development of reagents designed to alter their expression levels and thereby allow control of the differentiation process. In addition, identification of the genes involved in the process allows their use as diagnostic or prognostic markers which are uniquely associated with differentiation.

### SUMMARY OF THE INVENTION

[0006] The present invention relates to the elucidation of the global changes in gene expression in precursor stem cells undergoing the process of differentiation into osteoblasts. In one aspect, the present invention relates to detecting a change in an expression level of one or more genes or gene families associated with the differentiation of one or more precursor stem cells into one or more osteoblasts. In a related aspect, the activity of a protein encoded by a gene or member of a gene family may be assayed. Such assays may be conducted by themselves or in conjunction with determining an expression level. In some aspects, it may be desirable to determine an expression level of one or more genes or members of a gene family in Table 1 while at the same time determining an activity level of one or more proteins encoded by a gene or member of a gene family of Table 1. The genes or member of gene families for which expression levels are determined may be the same or different as the genes encoding the proteins assayed. Thus, in some embodiments, it may be desirable to determine the expression level of a gene and the activity level of the protein encoded by the gene. In other embodiments, it may be desirable to determine the expression level of one gene while determining the activity level of a protein encoded by another gene. Those skilled in the art will appreciate that the expression and/or activity level of any number of genes and proteins may be determined according to the present invention.

[0007] In a related aspect, the present invention includes methods of screening for an agent that modulates the differentiation of a precursor stem cell into an osteoblast, comprising: preparing a first gene or gene family expression profile and/or assaying for an activity of a protein encoded by a gene or member of a gene family of Table 1 in a cell population comprising one or more precursor stem cells; contacting the cell population with an agent; preparing a second gene or gene family expression profile and/or assaying for an activity of a protein encoded by a gene or member of a gene family of Tables 1 or 2 of the cell population after being contacted with the agent; and comparing the first and second expression profiles and/or activities.

[0008] In one aspect, the present invention provides a method of diagnosing a condition characterized by abnormal deposition of bone tissue, comprising detecting the level of expression in a tissue sample of one or more genes or gene families from Table 1 and/or assaying for an activity of a protein encoded by a gene or member of a gene family of Table 1, wherein differential expression and/or activity is indicative of inadequate bone tissue deposition.

[0009] In another aspect, the present invention also includes methods of monitoring the treatment of a patient with a condition characterized by abnormal bone tissue deposition, comprising administering a pharmaceutical composition to the patient, preparing a gene or gene family expression profile and/or assaying for an activity of a protein encoded by a gene or member of a gene family of Table 1 from a cell or tissue sample from the patient and comparing the patient expression profile and/or activity to an expression profile and/or activity from a precursor stem cell population or an osteoblast cell population.

[0010] In another aspect, the present invention also includes methods of treating a patient with a condition characterized by abnormal bone tissue deposition, comprising administering a pharmaceutical composition to the patient; preparing a gene or gene family expression profile and/or assaying for an activity of a protein encoded by a gene or member of a gene family of Table 1 from a cell or tissue sample from the patient comprising precursor stem cells; and comparing the patient expression profile and/or activity to an expression profile and/or activity from an untreated cell population comprising precursor stem cells.

[0011] The invention includes methods of diagnosing a condition characterized by an abnormal rate of formation of osteoblasts in a patient comprising detecting the level of expression in a tissue sample of one or more genes or gene families from Table 1 and/or assaying for an activity of a protein encoded by a gene or member of a gene family of Table 1; wherein differential expression and/or activity is indicative of an abnormal rate of formation of osteoblasts.

[0012] The invention includes a method of monitoring the treatment of a patient with a condition characterized by abnormal rate of formation of osteoblasts, comprising administering a pharmaceutical composition to the patient, preparing a gene or gene family expression profile and/or assaying for an activity of a protein encoded by a gene or member of a gene family of Table 1 from a cell or tissue sample from the patient and comparing the patient expression profile and/or activity to an expression profile and/or activity from a precursor stem cell population or an osteoblast cell population.

[0013] In a related aspect, the present invention provides a method of treating a patient with a condition characterized by an abnormal rate of formation of osteoblasts, comprising administering to the patient a pharmaceutical composition, wherein the composition alters the expression of at least one gene or gene family in Table 1 and/or alters an activity of a protein encoded by a gene or member of a gene family of Table 1, preparing an expression profile and/or assaying for an activity from a cell or tissue sample from the patient comprising precursor stem cells and comparing the patient expression profile and/or activity to an expression profile and/or activity from an untreated cell population comprising precursor stem cells.

[0014] The invention further includes a method of diagnosing osteoporosis in a patient comprising detecting the level of expression in a tissue sample of one or more genes or gene families from Table 1 and/or assaying for an activity of a protein encoded by a gene or member of a gene family of Table 1; wherein differential expression and/or activity is indicative of osteoporosis.

[0015] In a related aspect, the present invention provides a method of monitoring the treatment of a patient with osteoporosis, comprising administering a pharmaceutical composition to the patient, preparing a gene or gene family expression profile and/or assaying for an activity of a protein encoded by a gene or member of a gene family of Table 1 from a cell or tissue sample from the patient and comparing the patient expression profile and/or activity to an expression profile and/or activity from a precursor stem cell population or an osteoblast cell population.

[0016] In one aspect, the present invention provides a method of treating a patient with osteoporosis, comprising administering to the patient a pharmaceutical composition, wherein the composition alters the expression of at least one gene or gene family in Table 1 and/or alters an activity of a protein encoded by a gene or member of a gene family of Table 1, preparing an expression profile and/or assaying for an activity of a protein encoded by a gene or member of a gene family of Table 1 from a cell or tissue sample from the patient comprising precursor stem cells and comparing the patient expression profile and/or activity to an expression profile and/or activity from an untreated cell population comprising precursor stem cells.

[0017] Also included in the inventions are methods of screening for an agent capable of ameliorating the effects of osteoporosis, comprising exposing a cell to the agent; and detecting the expression level of one or more genes or gene families from Table 1 and/or assaying for an activity of a protein encoded by a gene or member of a gene family of Table 1.

[0018] In one aspect, the present invention is a method of monitoring the progression of bone tissue deposition in a patient, comprising detecting the level of expression in a tissue sample of one or more genes or gene families from Table 1 and/or assaying for an activity of a protein encoded by a gene or member of a gene family of Table 1; wherein differential expression and/or activity is indicative of bone tissue deposition.

[0019] In a related aspect, the present invention is a method of screening for an agent capable of modulating the deposition of bone tissue, comprising exposing a cell to the agent and detecting the expression level of one or more genes or gene families from Table 1 and/or assaying for an activity of a protein encoded by a gene or member of a gene family of Table 1.

[0020] All of these methods may include the step of detecting the expression levels of at least 1, 2, 3, 4, 5, 6, 7, 8, 9, 10 or more genes or members of the gene families in Table 1. Preferably, expression of all of the genes or members of the gene families or nearly all of the genes or members of the gene families in Table 1 may be detected. In a related aspect, the methods of the present invention may comprise the step of assaying for an activity of at least 1, 2, 3, 4, 5, 6, 7, 8, 9, 10 or more proteins encoded by a gene or member of a gene family of Table 1. In some preferred embodiments, the methods of the present invention may comprise both determining an expression level of one or more genes of members of a gene family of Table 1 and assaying an activity of one or more proteins encoded by a gene or member of a gene family of Table 1. In some embodiments, the expression level of a gene and the activity level of the protein encoded by the same gene may be determined. In other embodiments, the expression level of at least one gene may be determined while the activity level of at least one protein encoded by a different gene may be determined.

[0021] In one aspect, the present invention provides a method for identifying an agent that modulates the differentiation of precursor stem cells into osteoblasts comprising contacting a cell population with the agent and assaying for at least one activity of at least one gene or the activity of at least one member of a gene family identified in Table 1. In a related aspect, the present invention provides a method of monitoring the treatment of a patient with a condition characterized by abnormal bone deposition comprising administering a pharmaceutical composition to the patient and assaying for at least one activity of at least one gene or one member of a gene family identified in Table 1. The present invention also includes a method of diagnosing a condition characterized by the abnormal rate of formation of osteoblast comprising detecting the level of activity of at least one gene or one member of a gene family identified in Table 1.

[0022] In some preferred aspects, the present invention encompasses a composition comprising at least two oligonucleotides, wherein each of the oligonucleotides comprises a sequence that specifically hybridizes to one or more genes or members of a gene family in Table 1. In some aspects, the composition may comprise at least 1, 2, 3, 4, 5, 6, 7, 8, 9, 10 oligonucleotides, wherein each of the oligonucleotides comprises a sequence that specifically hybridizes to one or more genes or members of a gene family in Table 1. In some embodiments, one or more of the oligonucleotides may be attached to a solid support. The solid support may be any known to those skilled in the art including, but not limited to, a membrane, a glass support, a filter, a tissue culture dish, a polymeric material and a silicon support.

[0023] In a preferred aspect, the present invention provides a solid support to which is attached at least two oligonucleotides, wherein each of the oligonucleotides comprises a sequence that specifically hybridizes to at least one gene or to at least one member of a gene family in Table 1. In some embodiments, at least one oligonucleotide is attached covalently to the solid support. In some embodiments, at least one oligonucleotide is attached non-covalently to the solid support. Oligonucleotides may be attached to the solid supports of the invention at any density known to those skilled in the art, for example, at about at least 10 different oligonucleotides in discrete locations per square centimeter, at about at least 100 different oligonucleotides in discrete locations per square centimeter, at about at least 1000 different oligonucleotides in discrete locations per square centimeter and/or at about at least 10,000 different oligonucleotides in discrete locations per square centimeter. The selection of an appropriate density for a given application is a routine procedure for those skilled in the art.

[0024] The invention also includes computer systems comprising a database containing information identifying the expression level of one or more members of one or more of the gene families in Table 1 and/or the activity level of one or more proteins encoded by a gene or by a member of a gene family of Table 1 in a resting precursor stem cell and/or a precursor stem cell differentiating into an osteoblast and/or an osteoblast; and a user interface to view the information. The database may further comprise sequence information for one or more of the genes of one or one or more members of one or more of the gene families of Table 1. The database may comprise information identifying the expression level for one or more genes or one or more members of one or more of the gene families in the set of gene families expressed in a precursor stem cell that is not differentiating. The database may comprise information identifying the expression level for one or more genes or one or more members of one or more of the gene families in the set of genes or gene families expressed in a precursor stem cell that is differentiating into a cell type other than an osteoblast. The database may comprise information identifying the expression level for one or more genes or one or more members of one or more of the gene families in the set of genes or gene families expressed in a precursor stem cell that is differentiating into an osteoblast. The database may further contain or be linked to descriptive information from an external database, which information correlates said genes and/or gene families to records in the external database.

[0025] Lastly the invention includes methods of using the disclosed computer systems to present information identifying the expression level in a tissue or cell of a set of genes and/or gene families comprising at least one of the genes or gene families in Table 1, comprising comparing the expression level of at least one gene or gene family in Table 1 in the tissue or cell to the level of expression of the gene in the database. The invention also includes methods of using the disclosed computer systems to present information identifying the activity level in a tissue or cell of one or more proteins encoded by one or more genes and/or members of a gene family comprising at least one of the genes or gene families in Table 1, comprising comparing the activity level of at least one protein encoded by one gene or member of a gene family in Table 1 in the tissue or cell to the level of activity of the protein in the database.

### BRIEF DESCRIPTION OF THE DRAWINGS

[0026] FIG. 1A shows the expression level of an RNA related to aquaporin mRNA as a function of time in the absence (control-open circles solid line) and in the presence (BMP-2-open squares dashed line) of 300 ng/ml BMP-2. FIG. 1B shows the expression level of the RNA as a function of time in the absence (control-open circles solid line) and in the presence (open triangles dashed line) of 1 ng/ml TGFb-1.

[0027] FIG. 2A shows the expression level of an RNA related to the mRNA encoding Mpv 17 protein as a function of time in the absence (control-open circles solid line) and in the presence (open squares dashed line) of 300 ng/ml BMP-2. FIG. 2B shows the expression level as a function of time in the absence (control-open circles solid line) and in the presence (open triangles dashed line) of 1 ng/ml TGFb-1.

[0028] FIG. 3A shows the expression level of an RNA related to claudin protein mRNA as a function of time in the absence (control-open circles) and in the presence (open squares dashed line) of 300 ng/ml BMP-2. FIG. 3B shows the expression level as a function of time in the absence (control-open circles) and in the presence (open triangles dashed line) of 1 ng/ml TGFb-1.

[0029] FIG. 4A shows the expression level of an RNA related to SM22α mRNA as a function of time in the absence (control-open circles) and in the presence (open squares dashed line) of 300 ng/ml BMP-2. FIG. 4B shows the expression level as a function of time in the absence (control-open circles) and in the presence (open triangles dashed line) of 1 ng/ml TGFb-1.

[0030] FIG. 5 shows the expression level of the RNA of EST: AA722810 as a function of time in the absence (control-open circles solid line) and in the presence (open triangles dashed line) of 1 ng/ml TGFb-1.

[0031] FIG. 6A shows the expression level of the RNA related to the mRNA encoding PEDF as a function of time in the absence (control-open circles solid line) and in the presence (open squares dashed line) of 300 ng/ml BMP-2. FIG. 6B shows the expression level as a function of time in the absence (control-open circles solid line) and in the presence (open triangles dashed line) of 1 ng/ml TGFb-1.

[0032] FIG. 7A shows the expression level of TGFb II receptor mRNA as a function of time in the absence (control-open circles, solid line) and the presence (BMP-2-open squares, dashed line) of 300 ng/ml BMP-2. FIG. 7B shows the expression level of the RNA as a function of time in the absence (control-open circles, solid line) and in the presence (open triangles, dashed line) of 1 ng/ml TGFb-1.

[0033] FIG. 8 shows the expression level of Bradykinin B2 Receptor mRNA as a function of time in the absence (control-open circles, solid line) and the presence (BMP-2-open squares, dashed line) of 300 ng/ml BMP-2.

[0034] FIG. 9 shows the expression level of an mRNA related to Frizzled-related protein frpHE as a function of time in the absence (control-open circles, solid line) and in the presence (open triangles, dashed line) of 1 ng/ml TGFb-1.

[0035] FIG. 10A shows the expression level of AH Receptor mRNA as a function of time in the absence (control-open circles, solid line) and the presence (BMP-2-open squares, dashed line) of 300 ng/ml BMP-2. FIG. 10B shows the expression level of the RNA as a function of time in the absence (control-open circles, solid line) and in the presence (open triangles, dashed line) of 1 ng/ml TGFb-1.

[0036] FIG. 11A shows the expression level of GPx-4 mRNA as a function of time in the absence (control-open circles, solid line) and the presence (BMP-2-open squares, dashed line) of 300 ng/ml BMP-2. FIG. 11B shows the expression level of the RNA as a function of time in the absence (control-open circles, solid line) and in the presence (open triangles, dashed line) of 1 ng/ml TGFb-1.

[0037] FIG. 12A shows the expression level of Preproenkephalin mRNA as a function of time in the absence (control-open circles, solid line) and the presence (BMP-2-open squares, dashed line) of 300 ng/ml BMP-2. FIG. 12B shows the expression level of the RNA as a function of time in the absence (control-open circles, solid line) and in the presence (open triangles, dashed line) of 1 ng/ml TGFb-1.

[0038] FIG. 13 shows the expression level of Cartilage Derived Morphogenic Protein mRNA as a function of time in the absence (control-open circles, solid line) and the presence (open triangles, dashed line) of 1 ng/ml TGFb-1.

[0039] FIG. 14 shows the expression level of the RNA related to aquaporin mRNA as a function of time in the absence (control-open circles) and in the presence (BMP-2-closed squares) of 300 ng/ml BMP-2 or in the presence, (TGFb-1-closed circles) of 1 ng/ml TGFb-1.

[0040] FIG. 15 shows the expression level of the RNA related to C1 inhibitor mRNA as a function of time in the absence (control-open circles) and in the presence (13 MP-2-closed squares) of 300 ng/ml BMP-2 or in the presence (TGFb-1-closed circles) of 1 ng/ml TGFb-1.

[0041] FIG. 16 shows the expression level of RNA related to claudin 11 mRNA as a function of time in the absence (control-open circles) and in the presence (BMP-2-closed squares) of 300 ng/ml BMP-2 or in the presence (TGFb-1-closed circles) of 1 ng/ml TGF-β1.

[0042] FIG. 17 shows the expression level of DKK-1 mRNA as a function of time in the absence (control-open circles) and in the presence (BMP-2-closed squares) of 300 ng/ml BMP-2 or in the presence (TGFb-1-closed circles) of 1 ng/ml TGFb-1.

[0043] FIG. 18 shows the expression level of ESTAI869864 RNA as a function of time in the absence (control-open circles) and in the presence (BMP-2-closed squares) of 300 ng/ml BMP-2 or in the presence (TGFb-1-closed circles) of 1 ng/ml TGFb-1.

[0044] FIG. 19 shows the expression level of the RNA related to stromal cell derived receptor-1α mRNA as a function of time in the absence (control-open circles) and in the presence (BMP-2-closed squares) of 300 ng/ml BMP-2 or in the presence (TGFb-1-closed circles) of 1 ng/ml TGFb-1.

[0045] FIG. 20 shows the expression level of TGFb II Receptor mRNA as a function of time in the absence (control-solid circles) and in the presence of 300 ng/ml of BMP-2 (closed triangle, dotted line) or in the presence of 1 ng/ml TGFb1 (open square, solid line) in the case for HFSCs. For HMSCs, the mRNA was measured as a function of time in the absence (control-solid circle, solid line) and in the presence of 300 ng/ml of BMP-2 (solid triangle, dotted line) or in the presence of either 1 ng/ml TGFb (open square, solid line) or 100 nM dexamethasone (crosses, solid line).

[0046] FIG. 21 shows the expression level of Bradykinin B2 Receptor mRNA as a function of time in the absence (control-solid circles) and in the presence of 300 ng/ml of BMP-2 (closed triangle, dotted line) or in the presence of 1 ng/ml TGFb 1 (open square, solid line) in the case for HFSCs. For HMSCs, the mRNA was measured as a function of time in the absence (control-solid circle, solid line) and in the presence of 300 ng/ml of BMP-2 (solid triangle, dotted line) or in the presence of either 1 ng/ml TGFb (open square, solid line) or 100 nM dexamethasone (crosses, solid line).

[0047] FIG. 22 shows the expression level of the mRNA related to Frizzled related protein frpHE as a function of time in the absence (control-solid circles) and in the presence of 300 ng/ml of BMP-2 (closed triangle, dotted line) or in the presence of 1 ng/ml TGFb1 (open square, solid line) in the case for HFSCs. For HMSCs, the mRNA was measured as a function of time in the absence (control-solid circle, solid line) and in the presence of 300 ng/ml of BMP-2 (solid triangle, dotted line) or in the presence of either 1 ng/ml TGFb (open square, solid line) or 100 nM dexamethasone (crosses, solid line).

[0048] FIG. 23 shows the expression level of AH Receptor mRNA as a function of time in the absence (control-solid circles) and in the presence of 300 ng/ml of BMP-2 (closed triangle, dotted line) or in the presence of 1 ng/ml TGFb1 (open square, solid line) in the case for HFSCs. For HMSCs, the mRNA was measured as a function of time in the absence (control-solid circle, solid line) and in the presence of 300 ng/ml of BMP2 (solid triangle, dotted line) or in the presence of either 1 ng/ml TGFb (open square, solid line) or 100 nM dexamethasone (crosses, solid line).

[0049] FIG. 24 shows the expression level of GPx-4 mRNA as a function of time in the absence (control-solid circles) and in the presence of 300 ng/ml of BMP-2 (closed triangle, dotted line) or in the presence of 1 ng/ml TGFb1 (open square, solid line) in the case for HFSCs. For HMSCs, the mRNA was measured as a function of time in the absence (control-solid circle, solid line) and in the presence of 300 ng/ml of BMP-2 (solid triangle, dotted line) or in the presence of either 1 ng/ml TGFb (open square, solid line) or 100 nM dexamethasone (crosses, solid line).

[0050] FIG. 25 shows the expression level of preproenkephalin mRNA as a function of time in the absence (control-solid circles) and in the presence of 300 ng/ml of BMP-2 (closed triangle, dotted line) or in the presence of 1 ng/ml TGFb1 (open square, solid line) in the case for HFSCs. For HMSCs, the mRNA was measured as a function of time in the absence (control-solid circle, solid line) and in the presence of 300 ng/ml of BMP-2 (solid triangle, dotted line) or in the presence of either 1 ng/ml TGFb (open square, solid line) or 100 nM dexamethasone (crosses, solid line).

[0051] FIG. 26 shows the expression level of Cartilage-derived morphogenic protein mRNA as a function of time in the absence (control-solid circles) and in the presence of 300 ng/ml of BMP-2 (closed triangle, dotted line) or in the presence of 1 ng/ml TGFb1 (open square, solid line) in the case for HFSCs. For HMSCs, the mRNA was measured as a function of time in the absence (control-solid circle, solid line) and in the presence of 300 ng/ml of BMP-2 (solid triangle, dotted line) or in the presence of either 1 ng/ml TGFb (open square, solid line) or 100 nM dexamethasone (crosses, solid line).

### DETAILED DESCRIPTION

[0052] Many biological functions are accomplished by altering the expression of various genes through transcriptional (e.g. through control of initiation, provision of RNA precursors, RNA processing, etc.) and/or translational control. For example, fundamental biological processes such as cell cycle, cell differentiation and cell death, are often characterized by the variations in the expression levels of groups of genes.

[0053] Changes in gene expression also are associated with pathogenesis. For example, the lack of sufficient expression of functional tumor suppressor genes and/or the over expression of oncogene/protooncogenes could lead to tumorgenesis or hyperplastic growth of cells (Marshall, (1991) Cell 64:313-326; Weinberg, (1991) Science 254:1138-1146). Thus, changes in the expression levels of particular genes (e.g., oncogenes or tumor suppressors) serve as signposts for the presence and progression of various diseases.

[0054] Monitoring changes in gene expression may also provide certain advantages during drug screening development. Often drugs are screened for the ability to interact with a major target without regard to other effects the drugs have on cells. Often such other effects cause toxicity in the whole animal, which prevent the development and use of the potential drug.

[0055] The present inventors have examined cell populations comprising precursor stem cells and cell populations comprising precursor stem cells that have been induced to differentiate into osteoblasts to identify the global changes in gene expression during this differentiation process. These global changes in gene expression, also referred to as expression profiles, provide useful markers for diagnostic uses as well as markers that can be used to monitor disease states, disease progression, toxicity, drug efficacy and drug metabolism.

[0056] The expression profiles have been used to identify individual genes that are differentially expressed under one or more conditions. In addition, the present invention identifies families of genes that are differentially expressed. As used herein, “gene families” includes, but is not limited to, the specific genes identified by accession number herein, as well as related sequences. Related sequences may be, for example, sequences having a high degree of sequence identity with a specifically identified sequence either at the nucleotide level or at the level of amino acids of the encoded polypeptide. A high degree of sequence identity is seen to be at least about 65% sequence identity at the nucleotide level to said genes, preferably about 80 or 85% sequence identity or more preferably about 90 or 95% or more sequence identity to said genes. With regard to amino acid identity of encoded polypeptides, a high degree of identity is seen to be at least about 50% identity, more preferably about 75% identity and most preferably about 85% or more sequence identity. In particular, related sequences include homologous genes from different organisms. For example, if the specifically identified gene is from a non-human mammal, the gene family would encompass homologous genes from other mammals including humans. If the specifically identified gene is a human gene, gene family would encompass the homologous gene from different organisms. Those skilled in the art will appreciate that a homologous gene may be of different length and may comprise regions with differing amounts of sequence identity to a specifically identified sequence.

[0057] Assay Formats

[0058] The genes and sequences identified as being differentially expressed in the cell population induced to differentiate as well as related sequences may be used in a variety of nucleic acid detection assays to detect or quantititate the expression level of a gene or multiple genes in a given sample. For example, traditional Northern blotting, nuclease protection, RT-PCR, QPCR (quantitative RT-PCR), Taqman® and differential display methods may be used for detecting gene expression levels. Those methods are useful for some embodiments of the invention. However, methods and assays of the invention are most efficiently designed with hybridization-based methods for detecting the expression of a large number of genes.

[0059] Any hybridization assay format may be used, including solution-based and solid support-based assay formats. Solid supports containing oligonucleotide probes for differentially expressed genes of the invention can be filters, polyvinyl chloride dishes, silicon or glass based chips, etc. Such supports and hybridization methods are widely available, for example, those disclosed by WO 95/11755. Any solid surface to which oligonucleotides can be bound, either directly or indirectly, either covalently or non-covalently, can be used. A preferred solid support is a high density array or DNA chip. These contain a particular oligonucleotide probe in a predetermined location on the array. Each predetermined location may contain more than one molecule of the probe, but each molecule within the predetermined location has an identical sequence. Such predetermined locations are termed features. There may be, for example, from 2, 10, 100, 1000 to 10,000, 100,000 or 400,000 of such features on a single solid support. The solid support, or the area within which the probes are attached may be any convenient size and may preferably be on the order of a square centimeter.

[0060] Oligonucleotide probe arrays for expression monitoring can be made and used according to any techniques known in the art (see for example, Lockhart et al., (1996) Nat. Biotech. 14, 1675-1680; McGall et al., (1996) Proc. Nat. Acad. Sci. USA 93, 13555-13460). Such probe arrays may contain at least two or more oligonucleotides that are complementary to or hybridize to two or more of the genes described in Table 1. For instance, such arrays may also contain oligonucleotides that are complementary or hybridize to at least about 1, 2, 3, 4, 5, 6, 7, 8, 9, 10, 20, 30, 50, 70 or more the genes described herein.

[0061] The genes which are assayed according to the present invention are typically in the form of mRNA or reverse transcribed mRNA. The genes may be cloned or not. The genes may be amplified or not. The cloning itself does not appear to bias the representation of genes within a population. However, it may be preferable to use polyadenylated RNA as a source, as it can be used with less processing steps.

[0062] Table 1 provides the Accession numbers and name for the sequences of the differentially expressed markers (SEQ ID NO: 1-60). The sequences of the genes in GenBank are expressly incorporated herein.

[0063] Probes based on the sequences of the genes described above may be prepared by any commonly available method. Oligonucleotide probes for interrogating the tissue or cell sample are preferably of sufficient length to specifically hybridize only to appropriate, complementary genes or transcripts. Typically the oligonucleotide probes will be at least 10, 12, 14, 16, 18, 20 or 25 nucleotides in length. In some cases longer probes of at least 30, 40 or 50 nucleotides will be desirable.

[0064] As used herein, oligonucleotide sequences that are complementary to one or more of the genes and/or gene families described in Table 1, refer to oligonucleotides that are capable of hybridizing under stringent conditions to at least part of the nucleotide sequences of said genes. Such hybridizable oligonucleotides will typically exhibit at least about 75% sequence identity at the nucleotide level to said genes, preferably about 80 or 85% sequence identity or more preferably about 90 or 95% or more sequence identity to said genes.

[0065] “Bind(s) substantially” refers to complementary hybridization between a probe nucleic acid and a target nucleic acid and embraces minor mismatches that can be accommodated by reducing the stringency of the hybridization media to achieve the desired detection of the target polynucleotide sequence.

[0066] The terms “background” or “background signal intensity” refer to hybridization signals resulting from non-specific binding, or other interactions, between the labeled target nucleic acids and components of the oligonucleotide array (e.g., the oligonucleotide probes, control probes, the array substrate, etc.). Background signals may also be produced by intrinsic fluorescence of the array components themselves. A single background signal can be calculated for the entire array, or a different background signal may be calculated for each target nucleic acid. In a preferred embodiment, background is calculated as the average hybridization signal intensity for the lowest 5 to 10% of the probes in the array, or, where a different background signal is calculated for each target gene, for the lowest 5 to 10% of the probes for each gene. Of course, one of skill in the art will appreciate that where the probes to a particular gene hybridize well and thus appear to be specifically binding to a target sequence, they should not be used in a background signal calculation. Alternatively, background may be calculated as the average hybridization signal intensity produced by hybridization to probes that are not complementary to any sequence found in the sample (e.g., probes directed to nucleic acids of the opposite sense or to genes not found in the sample such as bacterial genes where the sample is mammalian nucleic acids). Background can also be calculated as the average signal intensity produced by regions of the array that lack any probes at all.

[0067] The phrase “hybridizing specifically to” refers to the binding, duplexing, or hybridizing of a molecule substantially to or only to a particular nucleotide sequence or sequences under stringent conditions when that sequence is present in a complex mixture (e.g., total cellular) DNA or RNA.

[0068] Assays and methods of the invention may utilize available formats to simultaneously screen at least about 100, preferably about 1000, more preferably about 10,000 and most preferably about 1,000,000 different nucleic acid hybridizations.

[0069] The terms “mismatch control” or “mismatch probe” refer to a probe whose sequence is deliberately selected not to be perfectly complementary to a particular target sequence. For each mismatch (MM) control in a high-density array there typically exists a corresponding perfect match (PM) probe that is perfectly complementary to the same particular target sequence. The mismatch may comprise one or more bases.

[0070] While the mismatch(s) may be located anywhere in the mismatch probe, terminal mismatches are less desirable as a terminal mismatch is less likely to prevent hybridization of the target sequence. In a particularly preferred embodiment, the mismatch is located at or near the center of the probe such that the mismatch is most likely to destabilize the duplex with the target sequence under the test hybridization conditions.

[0071] The term “perfect match probe” refers to a probe that has a sequence that is perfectly complementary to a particular target sequence. The test probe is typically perfectly complementary to a portion (subsequence) of the target sequence. The perfect match (PM) probe can be a “test probe” or a “normalization control” probe, an expression level control probe and the like. A perfect match control or perfect match probe is, however, distinguished from a “mismatch control” or “mismatch probe” as defined herein.

[0072] As used herein a “probe” is defined as a nucleic acid, capable of binding to a target nucleic acid of complementary sequence through one or more types of chemical bonds, usually through complementary base pairing, usually through hydrogen bond formation. As used herein, a probe may include natural (i.e., A, G, U, C or T) or modified bases (7-deazaguanosine, inosine, etc.). In addition, the bases in probes may be joined by a linkage other than a phosphodiester bond, so long as it does not interfere with hybridization. Thus, probes may be peptide nucleic acids in which the constituent bases are joined by peptide bonds rather than phosphodiester linkages.

[0073] The term “stringent conditions” refers to conditions under which a probe will hybridize to its target subsequence, but with only insubstantial hybridization to other sequences or to other sequences such that the difference may be identified. Stringent conditions are sequence-dependent and will be different in different circumstances. Longer sequences hybridize specifically at higher temperatures. Generally, stringent conditions are selected to be about 5° C. lower than the thermal melting point (Tₘ) for the specific sequence at a defined ionic strength and pH.

[0074] Typically, stringent conditions will be those in which the salt concentration is at least about 0.01 to 1.0 M sodium ion concentration (or other salts) at pH 7.0 to 8.3 and the temperature is at least about 30° C. for short probes (e.g., 10 to 50 nucleotides). Stringent conditions may also be achieved with the addition of destabilizing agents such as formamide.

[0075] The “percentage of sequence identity” or “sequence identity” is determined by comparing two optimally aligned sequences or subsequences over a comparison window or span, wherein the portion of the polynucleotide sequence in the comparison window may optionally comprise additions or deletions (i.e., gaps) as compared to the reference sequence (which does not comprise additions or deletions) for optimal alignment of the two sequences. The percentage is calculated by determining the number of positions at which the identical residue (e.g., nucleic acid base or amino acid residue) occurs in both sequences to yield the number of matched positions, dividing the number of matched positions by the total number of positions in the window of comparison and multiplying the result by 100 to yield the percentage of sequence identity.

[0076] Percentage sequence identity can be calculated by the local homology algorithm of Smith & Waterman, (1981) Adv. Appl. Math. 2:482-485; by the homology alignment algorithm of Needleman & Wunsch, (1970) J. Mol. Biol. 48:443-445; or by computerized implementations of these algorithms (GAP & BESTFIT in the GCG Wisconsin Software Package, Genetics Computer Group) or by manual alignment and visual inspection.

[0077] Percentage sequence identity when calculated using the programs GAP or BESTFIT is calculated using default gap weights. The BESTFIT program has two alignment variables, the gap creation penalty and the gap extension penalty, which can be modified to alter the stringency of a nucleotide and/or amino acid alignment produced by the program. Parameter values used in the percent identity determination were default values previously established for version 8.0 of BESTFIT (see Dayhoff, (1979) Atlas of Protein Sequence and Structure, National Biomedical Research Foundation, pp. 353-358).

[0078] Probe Design

[0079] One of skill in the art will appreciate that an enormous number of array designs are suitable for the practice of this invention. In some preferred embodiments, a high density array may be used. The high density array will typically include a number of probes that specifically hybridize to the sequences of interest (see WO 99/32660 for methods of producing probes for a given gene or genes). In addition, in a preferred embodiment, the array will include one or more control probes.

[0080] High density array chips of the invention include “test probes” as defined herein. Test probes could be oligonucleotides that range from about 5 to about 45 or 5 to about 500 nucleotides, more preferably from about 10 to about 40 nucleotides and most preferably from about 15 to about 40 nucleotides in length. In other particularly preferred embodiments, the probes are 20 or 25 nucleotides in length. In another preferred embodiment, test probes are double or single strand nucleic acid sequences, preferably DNA sequences. Nucleic acid sequences may be isolated or cloned from natural sources or amplified from natural sources using native nucleic acid as templates. These probes have sequences complementary to particular subsequences of the genes whose expression they are designed to detect. Thus, the test probes are capable of specifically hybridizing to the target nucleic acid they are to detect.

[0081] In addition to test probes that bind the target nucleic acid(s) of interest, the high density array can contain a number of control probes. The control probes fall into three categories referred to herein as (1) normalization controls; (2) expression level controls; and (3) mismatch controls.

[0082] Normalization controls are oligonucleotide or other nucleic acid probes that are complementary to labeled reference oligonucleotides or other nucleic acid sequences that are added to the nucleic acid sample to be screened. The signals obtained from the normalization controls after hybridization provide a control for variations in hybridization conditions, label intensity, “reading” efficiency and other factors that may cause the signal of a perfect hybridization to vary between arrays. In a preferred embodiment, signals (e.g., fluorescence intensity) read from all other probes in the array are divided by the signal (e.g., fluorescence intensity) from the control probes thereby normalizing the measurements.

[0083] Virtually any probe may serve as a normalization control. However, it is recognized that hybridization efficiency varies with base composition and probe length. Preferred normalization probes are selected to reflect the average length of the other probes present in the array, however, they can be selected to cover a range of lengths. The normalization control(s) can also be selected to reflect the (average) base composition of the other probes in the array, however in a preferred embodiment, only one or a few probes are used and they are selected such that they hybridize well (i.e., no secondary structure) and do not match any target-specific probes.

[0084] Expression level controls are probes that hybridize specifically with constitutively expressed genes in the biological sample. Virtually any constitutively expressed gene provides a suitable target for expression level controls. Typically expression level control probes have sequences complementary to subsequences of constitutively expressed “housekeeping genes” including, but not limited to the actin gene, the transferrin receptor gene, the GAPDH gene, and the like.

[0085] Mismatch controls may also be provided for the probes to the target genes, for expression level controls or for normalization controls. Mismatch controls are oligonucleotide probes or other nucleic acid probes identical to their corresponding test or control probes except for the presence of one or more mismatched bases. A mismatched base is a base selected so that it is not complementary to the corresponding base in the target sequence to which the probe would otherwise specifically hybridize. One or more mismatches are selected such that under appropriate hybridization conditions (e.g., stringent conditions) the test or control probe would be expected to hybridize with its target sequence, but the mismatch probe would not hybridize (or would hybridize to a significantly lesser extent). Preferred mismatch probes contain a central mismatch. Thus, for example, where a probe is a twenty-mer, a corresponding mismatch probe will have the identical sequence except for a single base mismatch (e.g., substituting a G, C or T for an A) at any of positions six through fourteen (the central mismatch).

[0086] Mismatch probes thus provide a control for non-specific binding or cross hybridization to a nucleic acid in the sample other than the target to which the probe is directed. Mismatch probes also indicate whether a hybridization is specific or not.

[0087] For example, if the target is present the perfect match probes should be consistently brighter than the mismatch probes. In addition, if all central mismatches are present, the mismatch probes can be used to detect a mutation. The difference in intensity between the perfect match and the mismatch probe provides a good measure of the concentration of the hybridized material.

[0088] Nucleic Acid Samples

[0089] As is apparent to one of ordinary skill in the art, nucleic acid samples, which may be DNA and/or RNA, used in the methods and assays of the invention may be prepared by any available method or process. Methods of isolating total mRNA are well known to those of skill in the art. For example, methods of isolation and purification of nucleic acids are described in detail in Chapter 3 of Tijssen, (1993) Laboratory Techniques in Biochemistry and Molecular Biology: Hybridization With Nucleic Acid Probes, Elsevier Press. Such samples include RNA samples, but also include cDNA synthesized from a mRNA sample isolated from a cell or tissue of interest. Such samples also include DNA amplified from the cDNA, and RNA transcribed from the amplified DNA. One of skill in the art would appreciate that it is desirable to inhibit or destroy RNase present in homogenates before homogenates can be used.

[0090] Biological samples may be of any biological tissue or fluid or cells from any organism as well as cells raised in vitro, such as cell lines and tissue culture cells. Frequently, the sample will be a “clinical sample” which is a sample derived from a patient. Typical clinical samples include, but are not limited to, sputum, blood, blood-cells (e.g., white cells), tissue or fine needle biopsy samples, urine, peritoneal fluid, and pleural fluid, or cells therefrom.

[0091] Biological samples may also include sections of tissues, such as frozen sections or formalin fixed sections taken for histological purposes.

[0092] Forming High Density Arrays

[0093] Methods of forming high density arrays of oligonucleotides with a minimal number of synthetic steps are known. The oligonucleotide analogue array can be synthesized on a solid substrate by a variety of methods, including, but not limited to, light-directed chemical coupling, and mechanically directed coupling (see U.S. Pat. No. 5,143,854).

[0094] In brief, the light-directed combinatorial synthesis of oligonucleotide arrays on a glass surface proceeds using automated phosphoramidite chemistry and chip masking techniques. In one specific implementation, a glass surface is derivatized with a silane reagent containing a functional group, e.g., a hydroxyl or amine group blocked by a photolabile protecting group. Photolysis through a photolithogaphic mask is used selectively to expose functional groups which are then ready to react with incoming 5′ photoprotected nucleoside phosphoramidites. The phosphoramidites react only with those sites which are illuminated (and thus exposed by removal of the photolabile blocking group). Thus, the phosphoramidites only add to those areas selectively exposed from the preceding step. These steps are repeated until the desired array of sequences have been synthesized on the solid surface. Combinatorial synthesis of different oligonucleotide analogues at different locations on the array is determined by the pattern of illumination during synthesis and the order of addition of coupling reagents.

[0095] In addition to the foregoing, additional methods which can be used to generate an array of oligonucleotides on a single substrate are described in WO 93/09668. High density nucleic acid arrays can also be fabricated by depositing premade or natural nucleic acids in predetermined positions. Synthesized or natural nucleic acids are deposited on specific locations of a substrate by light directed targeting and oligonucleotide directed targeting. Another embodiment uses a dispenser that moves from region to region to deposit nucleic acids in specific spots.

[0096] Hybridization

[0097] Nucleic acid hybridization simply involves contacting a probe and target nucleic acid under conditions where the probe and its complementary target can form stable hybrid duplexes through complementary base pairing (see WO 99/32660). The nucleic acids that do not form hybrid duplexes are then washed away leaving the hybridized nucleic acids to be detected, typically through detection of an attached detectable label. It is generally recognized that nucleic acids are denatured by increasing the temperature or decreasing the salt concentration of the buffer containing the nucleic acids. Under low stringency conditions (e.g., low temperature and/or high salt) hybrid duplexes (e.g., DNA:DNA, RNA:RNA or RNA:DNA) will form even where the annealed sequences are not perfectly complementary. Thus specificity of hybridization is reduced at lower stringency. Conversely, at higher stringency (e.g., higher temperature and/or lower salt and/or in the presence of destabilizing reagents) successful hybridization tolerates fewer mismatches. One of skill in the art will appreciate that hybridization conditions may be selected to provide any degree of stringency. In a preferred embodiment, hybridization is performed at low stringency in this case in 6×SSPE-T at 37° C. (0.005% Triton x-100) to ensure hybridization and then subsequent washes are performed at higher stringency (e.g., 1×SSPE-T at 37° C.) to eliminate mismatched hybrid duplexes. Successive washes may be performed at increasingly higher stringency (e.g., down to as low as 0.25×SSPET at 37° C. to 50° C.) until a desired level of hybridization specificity is obtained. Stringency can also be increased by addition of destabilizing agents such as formamide. Hybridization specificity may be evaluated by comparison of hybridization to the test probes with hybridization to the various controls that can be present (e.g., expression level control, normalization control, mismatch controls, etc.).

[0098] In general, there is a trade-off between hybridization specificity (stringency) and signal intensity. Thus, in a preferred embodiment, the wash is performed at the highest stringency that produces consistent results and that provides a signal intensity greater than approximately 10% of the background intensity. Thus, in a preferred embodiment, the hybridized array may be washed at successively higher stringency solutions and read between each wash. Analysis of the data sets thus produced will reveal a wash stringency above which the hybridization pattern is not appreciably altered and which provides adequate signal for the particular oligonucleotide probes of interest.

[0099] Signal Detection

[0100] The hybridized nucleic acids are typically detected by detecting one or more labels attached to the sample nucleic acids. The labels may be incorporated by any of a number of means well known to those of skill in the art (see WO 99/32660).

[0101] Databases

[0102] The present invention includes relational databases containing sequence information, for instance, for the genes and members of the gene families of Table 1 as well as gene expression information in various tissue samples saved on computer readable medium and/or a user interface. Databases may also contain information associated with a given sequence or tissue sample such as descriptive information about the gene associated with the sequence information, or descriptive information concerning the clinical status of the tissue sample, or the patient from which the sample was derived. The database may be designed to include different parts, for instance a sequence database and a gene expression database. Methods for the configuration and construction of such databases are widely available, for instance, see U.S. Pat. No. 5,953,727, which is herein incorporated by reference in its entirety.

[0103] The databases of the invention may be linked to an outside or external database. In a preferred embodiment, the external database is GenBank and the associated databases maintained by the National Center for Biotechnology Information (NCBI).

[0104] Any appropriate computer platform may be used to perform the necessary comparisons between sequence information, gene expression information and any other information in the database or provided as an input. For example, a large number of computer workstations are available from a variety of manufacturers, such has those available from Silicon Graphics. Client/server environments, database servers and networks are also widely available and appropriate platforms for the databases of the invention.

[0105] The databases of the invention may be used to produce, among other things, electronic Northerns that allow the user to determine the cell type or tissue in which a given gene is expressed and to allow determination of the abundance or expression level of a given gene in a particular tissue or cell.

[0106] The databases of the invention may also be used to present information identifying the expression level in a sample of a set of genes comprising one or more of the sequences of genes or members of the gene families of Table 1, comprising comparing the expression level of at least one gene or member of a gene family of Table 1 in the sample to the level of expression of the gene in the database. Such methods may be used to predict the differentiation state of the precursor stem cells present in a given sample by comparing the level of expression of a gene or member of a gene family in Table 1 from a sample to the expression levels found in normal, un-differentiated precursor stem cells and/or precursor stem cells induced to differentiate into osteoblasts and/or precursor stem cells induced to differentiate into a cell type other than an osteoblast and/or osteoblasts. Such methods may also be used in the drug or agent screening assays as described below.

[0107] Diagnostic uses for the Differentiation Markers

[0108] As described above, the genes and gene expression information provided in Table 1 may be used as diagnostic markers for the prediction or identification of the differentiation state of a sample comprising precursor stem cells. For instance, a tissue sample may be assayed by any of the methods described above, and the expression levels from a gene or member of a gene family from Table 1 may be compared to the expression levels found in undifferentiated precursor stem cells and/or precursor stem cells induced to differentiate into osteoblasts and/or precursor stem cells induced to differentiate into a cell type other than an osteoblast and/or osteoblasts. The comparison of expression data, as well as available sequence or other information may be done by researcher or diagnostician or may be done with the aid of a computer and databases as described above. Such methods may be used to diagnose or identify conditions characterized by abnormal bone deposition, reabsorption and/or abnormal rates of osteoblast differentiation.

[0109] Those skilled in the art will appreciate that a wide variety of conditions are associated with abnormal bone deposition or loss. Such conditions include, but are not limited to, osteoporosis, osteopenia, osteodystrophy, and various other osteopathic conditions. The methods of the present invention will be particularly useful in diagnosing or monitoring the treatment of conditions such as postmenopausal osteoporosis (PMO), glucocorticoid-induced osteoporosis (GIO) and male osteoporosis. Agents which modulate the expression of one or more the genes or gene families identified in Table 1 and/or modulate the activity of one or more of the proteins encoded by one or more of the genes or members of a gene family identified in Table 1 will be useful in treatment of the conditions.

[0110] In some preferred embodiments, the present invention may be used to diagnose and/or monitor the treatment of drug-induced abnormalities in bone formation or loss. For example, at present a combination of cyclosporine with prednisone is given to patients who have received an organ transplant in order to suppress tissue rejection. The combination causes rapid bone loss in a manner different than that observed with prednisone alone (such as elevated level of serum osteocalcin and 1,25(OH)₂-Vitamin D in patients treated with cyclosporine but not in patients treated with prednisone). Other drugs are also known to effect bone formation or loss. The anticonvulsant drugs diphenylhydantoin, phenobarbital and carbamazepine, and combination of these drugs, cause alterations in calcium metabolism. A decrease in bone density is observed in patients taking anticonvulsant drugs. Although heparin is an effective therapy for thromboembolic disorders, increased incidences of osteoporotic fractures have been reported in patients with heparin therapy hence the present invention will be useful to monitor patients undergoing heparin treatment.

[0111] Other embodiments of the present invention allow the diagnosis and/or monitoring of the treatment of other conditions that involve altered bone metabolism. For example, idiopathic juvenile osteoporosis (IJO) is a generalized decrease in mineralized bone in the absence of rickets or excessive bone resorption and typically occurs in children before the onset of puberty. In addition, thyroid diseases have been linked bone loss. A decrease in bone mass has been shown in patients with thyrotoxicosis causing these individuals to be at increased risk of having fractures. These individuals also sustain fractures at an earlier age than individuals who have never been thyrotoxic.

[0112] Other conditions in which the present invention will be useful include multiple myeloma and leukemia. Nearly 60% of patients with multiple myelomas have bone fractures with focal and lytic bone lesions and osteosclereotic bone lesions. Leukemia may also be associated with diffuse osteopenia and vertebral fracture in patients with acute lymphoblastic leukemia.

[0113] Another situation in which the present invention will be useful is the diagnosis and/or monitoring of the treatment of skeletal disease linked to breast cancer. Breast cancer frequently metastasizes to the skeleton and about 70% of patients with advanced cancer develop symptomatic skeletal disease. Moreover, the anticancer treatments presently in use have been shown to lead to early menopause and bone loss when given to premenopausal women.

[0114] The present invention will be useful in diagnosing and/or monitoring the treatment of chronic anemia associated with abnormal bone formation or loss. Homozygous beta-thalassemia is usually described as an example of chronic anemia predisposing to osteoporosis. Patients with thalassemia have expansion of bone marrow space with thinning of the adjacent trabeculae.

[0115] The present invention will be useful in diagnosing and/or monitoring the treatment of mastocytosis. Skeletal symptoms (osteopenia and vertebral fracture) are present in 60 to 75% of the patients with systemic mast cell disease.

[0116] Other conditions in which the present invention will find application are: Fanconi syndrome where osteomalacia is a common feature; fibrous dysplasia, McCune-Albright syndrome refers to patients with fibrous dysplasia with a sporadic, developmental disorder characterized by a unifocal or multifocal expanding fibrous lesion of bone-forming mesenchyme that often results in pain, fracture or deformity; osteogenesis imperfecta (OI, also called brittle bone disease) is associated with recurrent fractures and skeletal deformity, various skeletal dysplasias, i.e., osteochondroplasia which is characterized by abnormal development of cartilage and/or bone and other diseases such as achodroplasia, mucopolysacchaidoses, dysostosis and ischemic bone diseases.

[0117] The present invention will be particularly useful by providing one or markers which may be used as markers of bone turnover to determine osteoporosis.

[0118] The present invention may also be used in in vitro assays or treatments as a marker of osteoblast differentiation and/or proliferation.

[0119] The agents of the present invention may be used for a variety of purposes. In a preferred embodiment, they may be used in fracture repair of all types, i.e., non-union fractures, spinal fusion, accelerated healing of all types fractures from minor greenstick or compression fractures to comminuted, complicated fractures. Both local administrations to these fractures as well as parenteral administration which increases cartilage and bone formation, increases bone mass, and increases bone strength rapidly may be used. Another preferred embodiment of the present invention is the use of bone formation modulating agents in periodontal disease and/or for increasing bone around teeth.

[0120] Use of the Differentiation Markers for Monitoring Disease Progression

[0121] As described above, the genes and gene expression information provided in Table 1 may also be used as markers for the monitoring of disease progression, such as osteoporosis. For instance, a tissue sample may be assayed by any of the methods described above, and the expression levels for a gene or member of a gene family from Table 1 may be compared to the expression levels found in un-differentiated precursor stem cells and/or precursor stem cells induced to differentiate into osteoblasts and/or precursor stem cells induced to differentiate into a cell type other than an osteoblast and/or osteoblasts. The comparison of the expression data, as well as available sequence or other information may be done by researcher or diagnostician or may be done with the aid of a computer and databases as described above.

[0122] The markers of the invention may also be used to track or predict the progress or efficacy of a treatment regime in a patient. For instance, a patient's progress or response to a give drug may be monitored by creating a gene expression profile from a tissue or cell sample after treatment or administration of the drug. The gene expression profile may then be compared to a gene expression profile prepared from un-differentiated precursor stem cells and/or precursor stem cells induced to differentiate into osteoblasts and/or precursor stem cells induced to differentiate into a cell type other than an osteoblast and/or osteoblasts and/or from tissue or cells from the same patient before treatment. The gene expression profile may be made from at least one gene, preferably more than one gene, and most preferably all or nearly all of the genes in Table 1.

[0123] Use of the Differentiation Markers for Drug Screening

[0124] According to the present invention, the genes identified in Table 1 may be used as markers to evaluate the effects of a candidate drug or agent on a cell. A candidate drug or agent can be screened for the ability to stimulate the transcription or expression of a given marker or markers or to down-regulate or counteract the transcription or expression of a marker or markers. For instance, agents that modulate, induce or inhibit gene expression in a sample to that which resembles a gene expression profile in an osteoblast differentiated cell population may be screened for the ability to modulate the differentiation process, bone depositions, etc. According to the present invention one can also compare the specificity of a drug effect by looking at the number of markers which the drug has and comparing them. More specific drugs will have less transcriptional targets. Similar sets of markers identified for two drugs indicates a similarity of effects.

[0125] Assays to monitor the expression of a marker or markers as defined in Table 1 may utilize any available means of monitoring for changes in the expression level of the nucleic acids of the invention. As used herein, an agent is said to modulate the expression of a nucleic acid of the invention if it is capable of up- or down-regulating expression of the nucleic acid in a cell.

[0126] In one assay format, gene chips containing probes to one or more genes or members of a gene family from Table 1 may be used to directly monitor or detect changes in gene expression in the treated or exposed cell as described in more detail above. In another format, cell lines that contain reporter gene fusions between the open reading frame and/or 5′→3′ regulatory regions of a gene or member of a gene family in Table 1 and any assayable fusion partner may be prepared. Numerous assayable fusion partners are known and readily available including the firefly luciferase gene and the gene encoding chloramphenicol acetyltransferase (Alam et al., (1990) Anal. Biochem. 188:245-254). Cell lines containing the reporter gene fusions are then exposed to the agent to be tested under appropriate conditions and time. Differential expression of the reporter gene between samples exposed to the agent and control samples identifies agents which modulate the expression of the nucleic acid.

[0127] Additional assay formats may be used to monitor the ability of the agent to modulate the expression of a gene or member of a gene family identified in Table 1. For instance, as described above, mRNA expression may be monitored directly by hybridization of probes to the nucleic acids of the invention. Cell lines are exposed to the agent to be tested under appropriate conditions and time and total RNA or mRNA is isolated by standard procedures such those disclosed in Sambrook et al., (1989) Molecular Cloning: A Laboratory Manual, Cold Spring Harbor Laboratory Press.

[0128] In another assay format, cells or cell lines are first identified which express the gene products of the invention physiologically. Cells and/or cell lines so identified would be expected to comprise the necessary cellular machinery such that the fidelity of modulation of the transcriptional apparatus is maintained with regard to exogenous contact of agent with appropriate surface transduction mechanisms and/or the cytosolic cascades. Such cell lines may be, but are not required to be, bone marrow derived. Further, such cells or cell lines may be transduced or transfected with an expression vehicle (e.g., a plasmid or viral vector) construct comprising an operable non-translated 5′-promoter containing end of the structural gene encoding the instant gene products fused to one or more antigenic fragments, which are peculiar to the instant gene products, wherein said fragments are under the transcriptional control of said promoter and are expressed as polypeptides whose molecular weight can be distinguished from the naturally occurring polypeptides or may further comprise an immunologically distinct tag or some other detectable marker or tag. Such a process is well known in the art (see Sambrook et al., (1989) Molecular Cloning: A Laboratory Manual, Cold Spring Harbor Laboratory Press).

[0129] Cells or cell lines transduced or transfected as outlined above are then contacted with agents under appropriate conditions; for example, the agent comprises a pharmaceutically acceptable excipient and is contacted with cells comprised in an aqueous physiological buffer such as phosphate buffered saline (PBS) at physiological pH, Eagles balanced salt solution (BSS) at physiological pH, PBS or BSS comprising serum or conditioned media comprising PBS or BSS and/or serum incubated at 37° C. Said conditions may be modulated as deemed necessary by one of skill in the art. Subsequent to contacting the cells with the agent, said cells are disrupted and the polypeptides of the lysate are fractionated such that a polypeptide fraction is pooled and contacted with an antibody to be further processed by immunological assay (e.g., ELISA, immunoprecipitation or Western blot). The pool of proteins isolated from the “agent-contacted” sample is then compared with a control sample where only the excipient is contacted with the cells and an increase or decrease in the immunologically generated signal from the “agent-contacted” sample compared to the control is used to distinguish the effectiveness of the agent.

[0130] Another embodiment of the present invention provides methods for identifying agents that modulate the levels or at least one activity of a protein(s) encoded by the genes in Table 1. Such methods or assays may utilize any means of monitoring or detecting the desired activity.

[0131] In one format, the relative amounts of a protein of the invention between a cell population that has been exposed to the agent to be tested compared to an unexposed control cell population may be assayed. In this format, probes such as specific antibodies are used to monitor the differential expression of the protein in the different cell populations. Cell lines or populations are exposed to the agent to be tested under appropriate conditions and time. Cellular lysates may be prepared from the exposed cell line or population and a control, unexposed cell line or population. The cellular lysates are then analyzed with the probe, such as a specific antibody.

[0132] Agents that are assayed in the above methods can be randomly selected or rationally selected or designed. As used herein, an agent is said to be randomly selected when the agent is chosen randomly without considering the specific sequences involved in the association of the a protein of the invention alone or with its associated substrates, binding partners, etc. An example of randomly selected agents is the use a chemical library or a peptide combinatorial library, or a growth broth of an organism.

[0133] As used herein, an agent is said to be rationally selected or designed when the agent is chosen on a nonrandom basis which takes into account the sequence of the target site and/or its conformation in connection with the agent's action. Agents can be rationally selected or rationally designed by utilizing the peptide sequences that make up these sites. For example, a rationally selected peptide agent can be a peptide whose amino acid sequence is identical to or a derivative of any functional consensus site.

[0134] The agents of the present invention can be, as examples, peptides, small molecules, vitamin derivatives, as well as carbohydrates. Dominant negative proteins, DNA encoding these proteins, antibodies to these proteins, peptide fragments of these proteins or mimics of these proteins may be introduced into cells to affect function. “Mimic” used herein refers to the modification of a region or several regions of a peptide molecule to provide a structure chemically different from the parent peptide but topographically and functionally similar to the parent peptide (see Meyers, (1995) Molecular Biology and Biotechnology, VCH Publishers, 659-664). A skilled artisan can readily recognize that there is no limit as to the structural nature of the agents of the present invention.

[0135] Without further description, it is believed that one of ordinary skill in the art can, using the preceding description and the following illustrative examples, make and utilize the compounds of the present invention and practice the claimed methods. The following working examples therefore, specifically point out the preferred embodiments of the present invention, and are not to be construed as limiting in any way the remainder of the disclosure.

### EXAMPLES

### Example 1

[0136] Identification of Genes Differentially Expressed in Differentiating Precursor Stem Cells

[0137] Human Fetal Stromal Cells (HFSCs) were obtained from Dr. Xu Cao, Department of Pathology at the University of Alabama These cells were isolated from the bone marrow of a twenty-week human embryo. BFSCs are derived from a primary culture and represent a heterogeneous population of osteoprogenitor cells. HFSCs exhibit a high replicative capacity, with a doubling time of approximately twenty hours. HFSCs retain a spindle-shaped morphology and have a uniform attachment throughout subcultivation. HFSCs can be sub-cultured up to twelve passages while retaining both proliferative and osteogenic capability.

[0138] HFSCs used for READS analysis or QPCR (quantitative RT-PCR) were cultured in Dulbecco's Modified Eagle Medium (DMEM)-high glucose or DMEM-low glucose supplemented with 10% Fetal Bovine Serum, respectively, at 37° C. in a humidified atmosphere containing 95% air and 5% CO₂ in the absence and presence of the indicated treatment. RNA was extracted from the cells at zero minutes, three hour, six hours, twelve hours, twenty-four hours, forty-eight hours, three days, six days, twelve days and twenty-four days. When indicated, cells were contacted with either bone morphogenic protein-2 (BMP-2) at 300 ng/ml or transforming growth factor beta (TGF-beta) at 1 ng/ml or cycloheximide at 1 μM. Cells were incubated for the period of time indicated and harvested.

[0139] Total cellular RNA was prepared from the human fetal stromal cells described above. Synthesis of cDNA was performed as previously described in WO 97/05286 and in Prashar et al., (1996) Proc. Natl. Acad. Sci. USA 93:659-663 (READs). Briefly, cDNA was synthesized according to the protocol described in the GibcoBRL kit for cDNA synthesis. The reaction mixture for first-strand synthesis included 6 μg of total RNA, and 200 ng of a mixture of one-base anchored oligo(dT) primers with all three possible anchored bases (ACGTAATACGACTCACTATAGGGCGAATTGGGTCGACTTTTTTTTTTTTTTTTT n1 (SEQ ID NO: 61) wherein n1=A/C or G) along with other components for first-strand synthesis reaction except reverse transcriptase. This mixture was incubated at 65° C. for five minutes, chilled on ice and the process repeated. Alternatively, the reaction mixture may include 10 μg of total RNA and 2 pmol of one of the two-base anchored. Oligo(dT) primers annealed such as RP5.0 (CTCTCAAGGATCTTACCGCTT₁₈AT) (SEQ ID NO: 62) or RP6.0 (TAATACCGCGCCACATAGCAT₁₈CG) (SEQ ID NO: 63) or RP9.2 (CAGGGTAGACGACGCTACGCT₁₈GA) (SEQ ID NO: 64) along with other components for first-strand synthesis reaction except reverse transcriptase. This mixture was then layered with mineral oil and incubated at 65° C. for seven minutes followed by 50° C. for another seven minutes. At this stage, 2 μl of Superscript® reverse transcriptase (200 units/μl; Gibco/BRL) was added quickly and mixed, and the reaction continued for one hour at 45-50° C. Second-strand synthesis was performed at 16° C. for two hours. At the end of the reaction, the cDNA was precipitated with ethanol and the yield of cDNA was calculated. In our experiments, 200 ng of cDNA was obtained from 10 μg of total RNA.

[0140] The adapter oligonucleotide sequences were A1 (TAGCGTCCGGCGCAGCGACGGCCAG (SEQ ID NO: 65) and A2 (GATCCTGGCCGTCGGCTGTCTGTCGGCGC) (SEQ ID NO: 66). One microgram of oligonucleotide A2 was first phosphorylated at the 5′ end using T4 polynucleotide kinase (PNK). After phosphorylation, PNK was heated denatured, and 1 μg of the oligonucleotide A1 was added along with 10× annealing buffer (1 M NaCl/100 mM Tris-HCl (pH 8.0), 10 mM EDTA (H 8.0)) in a final volume of 20 μl. This mixture was then heated at 65° C. for ten minutes followed by slow cooling to room temperature for thirty minutes, resulting in formation of the Y adapter at a final concentration of 100 ng/μl. About 20 ng of the cDNA was digested with 4 units of Bgl II in a final volume of 10:1 for thirty minutes at 37° C. Two microliters (4 ng of digested cDNA) of this reaction mixture was then used for ligation to 100 ng (fifty-fold) of the Y-shaped adapter in a final volume of 5 μl for sixteen hours at 15° C. After ligation, the reaction mixture was diluted with water to a final volume of 80 μl (adapter ligated cDNA concentration, 50 pg/μl) and heated at 65° C. for ten minutes to denature T4 DNA ligase and 2 μl aliquots (with 100 pg of cDNA) were used for PCR.

[0141] The following sets of primers were used for PCR amplification of the adapter ligated 3′-end cDNA: GAAGCCGAGACGTCGGTCG(T)₁₈ n1, n2 (SEQ ID NO: 67) (wherein n1, n2=AA, AC, AG, AT, CA, CC, CG, CT, GA, GC, GG or GT) as the 3′ primer with A1 as the 5′ primer or alternatively P5.0, RP6.0 or RP9.2 used as 3′ primers with primer A1.1 serving as the 5′ primer. To detect the PCR products on the display gel, 24 pmol of oligonucleotide A1 or A1.1 was 5′-end-labeled using 15:1 of [gamma-³²P]ATP (Amersham; 3000 Ci/mmol) and PNK in a final volume of 20 μl for thirty minutes at 37° C. After heat denaturing PNK at 65° C. for twenty minutes, the labeled oligonucleotide was diluted to a final concentration of 2 μM in 80 μl with unlabeled oligonucleotide A1.1. The PCR mixture (20 μl) consisted of 2 μl (100 pg) of the template, 2 μl of 10×PCR buffer (100 mM Tris.HCl (pH 8.3), 500 mM KCl), 2 μl of 15 mM MgCl₂ to yield 1.5 mM final Mg²⁺ concentration optimum in the reaction mixture, 200 μM dNTPs, 200 nM each 5′ and 3′ PCR primers, and 1 unit of Amplitaq® Gold. Primers and dNTPs were added after preheating the reaction mixture containing the rest of the components at 85° C. This “hot start” PCR was done to avoid amplification artifacts arising out of arbitrary annealing of PCR primers at lower temperature during transition from room temperature to 94° C. in the first PCR cycle. PCR consisted of five cycles of 94° C. for thirty seconds, 55° C. for two minutes, and 72° C. for sixty seconds followed by twenty-five cycles of 94° C. for thirty seconds, 60° C. for two minutes, and 72° C. for sixty seconds. A higher number of cycles resulted in smeary gel patterns. PCR products (2.5 μl) were analyzed on 6% polyacrylamide sequencing gel. For double or multiple digestion following adapter ligation, 13.2 μl of the ligated cDNA sample was 0.25 digested with a secondary restriction enzyme(s) in a final volume of 20 μl. From this solution, 3 μl was used as template for PCR. This template volume of 3 μl carried 100 pg of the cDNA and 10 mM MgCl₂ (from the 10× enzyme buffer), which diluted to the optimum of 1.5 mM in the final PCR volume of 20 μl. Since Mg²⁺ comes from the restriction enzyme buffer, it was not included in the reaction mixture when amplifying secondarily cut cDNA. Individual cDNA fragments corresponding to mRNA species were separated by denaturing polyacrylamide gel electrophoresis and visualized by autoradiography.

[0142] Bands identified as having different expression levels in treated versus untreated human fetal stromal cells were extracted from the display gels as described by Liang et al., (1995) Curr. Opin. Immunol. 7:274-280), reamplified using the 5′- and 3′-primers, and subcloned into pCR-Script with high efficiency using the PCR-Script cloning kit from Stratagene. Plasmids were sequenced by cycle sequencing on an ABI automated sequencer. Alternatively, bands were extracted (cored) from the display gels, PCR amplified and sequenced directly without subcloning.

[0143] The sequences thus identified are listed in Table 1 along with any related sequences as indicated by the designation “Related To” under the Class column in Table 1. This table also provides the GenBank accession number and name of the genes related to the sequences identified by the READs analysis. The identity column of Table 1 contains information on the closeness of the sequence determined by READS analysis to the sequence in the public database. For example, the first entry of Table 1 indicates that the sequence of the fragment identified by READS is identical to the published sequence in 343 of the 348 positions of the READS fragment and has 98% sequence identity to the published sequence. The last column of Table 1 also indicates whether the expression of the sequence identified by READS analysis was up- or down-regulated in the differentiation process.

[0144] FIGS. 1-25 present a graphic depiction of the expression level of some genes whose expression pattern was found to be dependent upon the activation state of the precursor stem cells. These figures represent the data obtained from READS gel analysis of the mRNA expression data from Human Fetal Stromal Cells. READS analysis (as described above) was performed on the total RNA samples isolated from HFSCs that were treated with either TGFb (1 ng/ml of culture media) or BMP-2 (300 ng/ml of culture media) for up to twenty-four days. Time points were selected at one, three, six, twelve and twenty-four days post initial treatment. In a few cases, time points were selected at thirty minutes, three, six, twelve, twenty-four and forty-eight hours post initial treatment. Control cells received media only with no added osteogenic agent. Subsequent to READS gel analysis, the images of each gel were converted into electronic format and the intensities of each band of interest were calculated relative to the background autoradiographic intensity of each gel image. The corrected values are termed adjusted intensity values, which were plotted on the y-axis versus the time course of the experiment.

### Example 2

[0145] Gene Chip Expression Analysis

[0146] Precursor stem cells (for example, HFSCs or human mesenchymal stem cells) which may be treated with a differentiation inducing agent and/or osteoblasts may be obtained using any means known to those skilled in the art. For example, human mesenchymal stem cells (HMSCs) are isolated from human bone marrow and are capable of differentiating into bone, cartilage, fat and other connective tissues. HMSCs exposed to osteogenic stimulus undergo osteogenic differentiation by showing an increase in alkaline phosphatase (APase) enzyme activity and deposition of mineralized hydroxtapatite extracellular matrix (Jaiswal et al., (1997) J. Cell. Biochem 64:295-312). HMSCs obtained from Clonetics were expanded to passage four and cultured in a basal medium (DMEM-LG containing 10% FBS and 1% antibiotic/antimycotic) at 37° C. in a humidified atmosphere containing 95% air and 5% CO₂. Cultures were treated with BMP-2 (100 ng/ml) and TGFb1 (1 ng/ml) to extract RNA at twenty minutes, three, six, twelve, twenty-four, and forty-eight hours and, three, six, twelve and sixteen days.

[0147] Microarray sample preparation may be conducted following the protocols set forth in the Affymetrix GeneChip Expression Analysis Manual. For example, samples comprising cells of interest or tissue comprising such cells may be frozen. Frozen samples may be ground to a powder, for example, using a Spex Certiprep 6800 Freezer Mill. Total RNA may be extracted using conventional techniques such as with Trizol (GibcoBRL) utilizing the manufacturer's protocol. The total RNA yield for each sample will likely be in the range of 200-500 μg per 300 mg sample weight. mRNA may be isolated using the Oligotex mRNA Midi kit (Qiagen) followed by ethanol precipitation. Double stranded cDNA can be generated using conventional techniques such as those described above of by using the SuperScript Choice system (GibcoBRL). First strand cDNA synthesis may be primed with a T7-(dT24) oligonucleotide. The cDNA may be purified, i.e., may be phenol-chloroform extracted and ethanol precipitated. The cDNA may be re-suspended at final concentration of about 1 μg/ml. From 2 μg of cDNA, cRNA may be synthesized using Ambion's T7 MegaScript® in vitro Transcription Kit.

[0148] In preferred embodiments, the cRNA may be detectably labeled. The cRNA may be directly labeled by incorporating one or more detectable moieties into the cRNA molecule. In other embodiments, the cRNA may incorporate a moiety to which a detectably labeled reagent may bind. For example, the cRNA may incorporated a biotin or digoxigenin moiety and may be detected using a detectably labeled avid/streptavidin or anti-digoxigenin antibody. To incorporate a moiety to which a detectably labeled reagent may bind, nucleoside triphosphates containing the binding moiety may be added to the transcription reaction. For example, nucleotides Bio-11-CTP and Bio-16-UTP (Enzo Diagnostics) may be added to the reaction. The transcription reaction may be allowed to proceed an appropriate length of time in order to generate the desired amount of cRNA. Suitable conditions might be a 37° C. incubation for six hours. Typically, impurities can be removed from the cRNA using conventional techniques such as, for example, using the RNeasy® Mini kit protocol (Qiagen). cRNA can be fragmented by heating in a suitable buffer. One example of a suitable buffer would be of 200 mM Tris-acetate (pH 8.1), 500 mM KOAc and 150 mM MgOAc. The cRNA maybe heated at 94° C. for about thirty minutes.

[0149] The fragmented cRNA can be assayed using a gene chip. In some embodiments, the assay may be conducted using the Affymetrix protocol. For example, 55 μg of fragmented cRNA may be hybridized on the Affymetrix Human 42K array set for twenty-four hours at 60 rpm in a 45° C. hybridization oven. The chips may be washed and stained with a suitable reagent. When biotin is incorporated into the cRNA, one suitable reagent might be Streptavidin Phycoerythrin (SAPE) (Molecular Probes). To amplify staining, SAPE solution may be added twice with an anti-streptavidin biotinylated antibody (Vector Laboratories) staining step in between. Hybridization to the probe arrays may be detected using any technique known to those skilled in the art, for example, by fluorometric scanning using a Hewlett Packard Gene Array Scanner. Data may be analyzed using Affymetrix GeneChip® version 3.0 and Expression Data Mining Tool (EDMT) software (version 1.0). When the Affymetrix GeneChip 42K human gene chip is used to assay expression levels, the EDMT may be set to the following criteria: (1) For each gene, Affymetrix GeneChip average difference values may be determined by standard Affymetrix EDMT software algorithms, which also made “Absent” (=not detected), “Present” (=detected) or “marginal” (=not clearly Absent or Present) calls for each GeneChip element; (2) all negative values (=Absent) can be raised to a floor of +20 (positive 20) so that fold change calculations may be made where values were not already greater than or equal to +20; (3) median levels of expression may be compared between the differentiating and non-differentiating cells to obtain greater than or equal three-fold up/down values; (4) The median value for the higher expressing group may be greater or equal to 200 average difference units in order to be considered for statistical significance; (5) Genes passing the first four criteria will be analyzed for statistical significance using a two-tailed T test and deemed statistically significant if p<0.05.

[0150] The expression levels of one or more of the genes identified as involved in the differentiation of precursor stem cells may be assayed as described above. To serve as a positive control, the expression level of a gene that does not change during differentiation may be assayed.

### Example 3

[0151] Quantitative RT-PCR Verification of Expression Levels

[0152] FIGS. 15-26 show quantitative RT-PCR profiles from some of the selected targets described in Table 1. Human fetal stromal cells (HFSCs) and Human Mesenchymal stem cells (HMSCs) were used for this study. Briefly, PCR primers were designed using the DNA sequences provided by sequence analysis of the READS fragments. TaqMan probes were also designed using the READS fragment sequence information. Experimental conditions were as follows: HFSCs were cultures in vitro and were left untreated for up to twenty days, or were treated with the osteogenic agents TGFb (1 ng/ml culture media) or BMP-2 (300 ng/ml of culture media) for the same period. HMSCs were also cultured in vitro and were left untreated for sixteen days, or were treated with TGFb (1 ng/ml culture media), BMP-2 (300 ng/ml culture media) or dexamethasone (100 nM) for the same time period. Cells in each treatment group were harvested at zero, three, six and twelve hours, one, three, six, twelve and twenty days in the case of HFSCs. For the HMSC experiments, cells were harvested at zero, three, six and twelve hours, one, three, six, twelve and sixteen days post treatment. Total RNA was isolated from the cells using Trizol and the RNA was quantitated using a spectrophotometer set at A₂₆₀. Total RNA (10 ng) was assayed in duplicate suing the TaqMan® assay (Perkin-Elmer) in biplex format where each target gene in each RNA sample was assayed versus a reference mRNA which was shown previously to be constitutively expressed and not regulated by any of the osteogenic treatments. The threshold cycle (C_{T}) values of the target and reference gene were analyzed and the delta CT values were calculated for each RNA sample. Fold change (expressed as relative expression) was plotted versus the time course of the experiment. Expression was relative to the delta CT value (Target CT minus Reference CT) for t=0 which was set to a value of 1.0.

### Example 4

[0153] Activity Assays

[0154] The present invention has identified numerous genes and gene families differentially regulated during the differentiation of precursor stem cells into osteoblasts. The activity levels of proteins encoded by these genes or members of gene families may be assayed using any technique known to those skilled in the art. When the encoded protein is an enzyme, it may be desirable to assay the enzymatic activity of the protein. This may accomplished, for example, by contacting a sample with a substrate for the enzyme and assaying for the conversion of substrate to product. For example, a labeled substrate may be provided which is converted into a labeled product which may be subsequently quantified. Labels may be of any type conventionally used by those skilled in the art for this purpose. In some preferred embodiments, the label may be a chromophoric group, a fluorescent group, a radioactive group or other detectable group.

[0155] In some instances it may be preferable to detect the activity using an immunological technique such as Western blotting, ELISA, radio-immunoprecipitation (RIP) and the like. Thus, the term activity is seen to include the physical presence of the protein of interest. This may be useful in cases where the protein lacks a readily assayable enzymatic activity or where, for other reasons, assaying an enzymatic activity is not desirable.

[0156] An agent which may be an activator or inhibitor of a particular biological target may be assayed. The assays may be cell-free assays to measure the biological activity of protein target after disruption of the cell in which the target is expressed. The assays may be cell based assays to determine the activity of the target protein by measuring a biological response of a cell in which the target protein is located.

[0157] Cell-free assays may optionally include one or more purification steps. Such purification steps include, but are not limited to, centrifugation steps, precipitation steps and chromatographic steps. After disruption of the cell expressing the protein target of interest, the target may be purified to a desired purity before the assay is conducted. When the assay is specific for the activity in question, it may be desirable to use the disrupted cells with no purification step. In other instances, it may be desirable to purify the desired activity from one or more contaminants prior to assaying. In a preferred cell-free system, enzyme activity or receptor binding may be measured using europhium-chelated antibody specific for target enzyme or europhium-derivitized ligand that binds to receptor (see, for example, Mathis, (1993) Clin. Chem. 39:1953-1959; Gaarde et al., (1997) J. Biomol. Screen. 2:213-223). In some embodiments, fluorescence polarization/correlation spectroscopy can also be used to measure enzymatic or binding reaction by using fluorescenylated peptide substrate or target (Seethala et al., (1997) Anal. Biochem, 253:210-218, 1997, Lynch et al., (1997) Anal Biochem 247:77-82).

[0158] Cell-based assays using reporter genes may be used for the screening of compounds. Activation of a cell surface receptor or a ligand-gated ion channel can induce a change in the transcription pattern of a number of genes. The ligand-induced alteration in transcription can be measured using gene fusion, in which a promoter element responsive to activation is fused to the coding region for an enzyme or protein whose level can easily be measured (Martin et al., (1996) Biotechniques 21:520-524). Other assays, which detect immediate early response to gene activation are—elevation of second messengers (cAMP, Ca²⁺), phosphorylation of an intermediate signaling protein or subcellular translocation of a signaling molecule (Stable et al., (1997) Anal. Biochem. 252:115-126; Miyawaki et al., (1997) Nature 388:882-887; Lenormand et al., (1993) J. Cell. Biol. 122:1079-1088). Design and execution of such assays are routine in the art.

### Example 5

[0159] Drug Screening Assays

[0160] Candidate agents and compounds will be screened for their ability to modulate the expression levels and/or activities of one or more of the genes identified as being involved in the differentiation of precursor stem cells into osteoblasts by any technique known to those skilled in the art including those assays described above. In some preferred embodiments, the assay of gene expression level may be conducted using real time PCR. Real time PCR detection may be accomplished by the use of the ABI PRISM 7700 Sequence Detection System. This system measures the fluorescence intensity of the sample each cycle and is able to detect the presence of specific amplicons within the PCR reaction. Each sample is assayed for the level of one or more of the genes identified as being involved in the differentiation of precursor cells into osteoblasts including, but not limited to, those genes and members of gene families identified in Table 1.

[0161] The expression level of a control gene, for example GAPDH, may be used to normalize the expression levels. Suitable primers for the candidate genes may be selected using techniques well known to those skilled in the art. These primers may be used in conjunction with SYBR green (Molecular Probes), a nonspecific double stranded DNA dye, to measure the expression level mRNA corresponding to the genes, which will typically be normalized to the GAPDH level in each sample.

[0162] Normalized expression levels from cells exposed to the agent are then compared to the normalized expression levels in control cells. Agents that modulate the expression of one or more the genes may be further tested as drug candidates in appropriate in vitro and/or in vivo models.

[0163] Although the present invention has been described in detail with reference to examples above, it is understood that various modifications can be made without departing from the spirit of the invention. Accordingly, the invention is limited only by the following claims. All cited patents, applications and publications referred to in this application are herein incorporated by reference in their entirety.

| SEQ. | | | | | Expression |
|---|---|---|---|---|---|
| ID | Class | GB Number | GB Name | Identity | Profile |
| 1 | MatchGene | X53390 | Human upstream binding factor | 238/241 98 | Upregulated |
| 2 | | X53461 | Human upstream binding factor | 238/241 98 | Upregulated |
| 3 | | AC004596 | Homo sapiens chromosome 17, clone | 234/236 99 | Upregulated |
| | | | hCIT.175_E_5 | | |
| 4 | MatchGene | AF155135 | Homo sapiens novel retinal pigment | 479/484 98 | Upregulated |
| | | | epithelial cell protein | | |
| 5 | | AB037755 | Homo sapiens | 479/484 98 | Upregulated |
| | | | KIAA1334 protein | | |
| 6 | MatchGene | AF153606 | Homo sapiens angiopoietin- | 388/416 93 | Upregulated |
| | | | related protein | | |
| 7 | | AF169312 | Homo sapiens hepatic angiopoietin- | 136/137 99 | Upregulated |
| | | | related protein (ANGPTL2) | | |
| 8 | MatchGene | AL078459 | Human clone RP4-621F18chr.1p11.4- | 435/438 99 | Upregulated |
| | | | 21.3.3 ng,ng dimethylarginine | | |
| | | | dimethylaminohydrolase | | |
| 9 | | AB001915 | Homo sapiens cDNA for NG,NG- | 73/73 100 | Upregulated |
| | | | dimethylarginine dimethylaminohydrolase | | |
| 10 | MatchGene | X17620 | Human mRNA for Nm23 protein | 500/504 99 | Upregulated |
| 11 | | X75598 | Homo sapiens nm23H1 gene | 309/310 99 | Upregulated |
| 12 | | AL360191 | Homo sapiens full length insert | 503/508 99 | Upregulated |
| | | | cDNA clone EUROIMAGE 781354 | | |
| 13 | | AL360166 | Homo sapiens mRNA full length | 502/508 98 | Upregulated |
| | | | insert cDNA clone EUROIMAGE | | |
| | | | 300041 | | |
| 14 | MatchGene | AF038633 | Homo sapiens Mpv17 gene and | 201/235 85 | Downregulated |
| | | | urocortin gene | | |
| 15 | | X76538 | Homo sapiens Mpv17 | 197/232 84 | Downregulated |
| 16 | MatchGene | X07577 | Human mRNA for C1 inhibitor | 251/252 99 | Downregulated |
| 17 | | X07433 | Homo sapiens for C1 inhibitor | 251/252 99 | Downregulated |
| | | | exon 8 | | |
| 18 | | M13656 | Human plasma protease (C1) | 250/252 99 | Downregulated |
| | | | inhibitor | | |
| 19 | | X54486 | Human gene for C1 inhibitor | 253/254 99 | Downregulaled |
| 20 | | M13690 | Human plasma protease (C1) | 246/253 97 | Downregulated |
| | | | inhibitor | | |
| 21 | MatchGene | X66924 | Homo sapiens heir-1 mRNA for | 486/540 90 | Upregulated |
| | | | helix-loop-helix protein | | |
| 22 | | X69111 | Homo sapiens HLH 1R21 mRNA for | 464/514 90 | Upregulaled |
| | | | helix-loop-helix protein | | |
| 23 | | X73428 | Homo sapiens Id3 gene for HLH | 459/525 87 | Upregulated |
| | | | type transcription factor | | |
| 24 | | AL021154 | Homo sapiens PAC 150O5 chr. | 460/525 87 | Upregulated |
| | | | 1p36.13-36.22 Contains E2F2 | | |
| | | | gene and ID3 gene | | |
| 25 | MatchGene | S63168 | CCAAT/enhancer-binding protein | 278/278 100 | Downregulated |
| | | | delta = transcription factor | | |
| | | | CRP3 homolog | | |
| 26 | | M83667 | Human NF-IL6-beta protein | 273/279 97 | Downregulated |
| 27 | MatchGene | AF109127 | Homo sapiens stromal cell-derived | 252/269 93 | Upregulated |
| | | | receptor-1 alpha | | |
| 28 | | AF109126 | Homo sapiens stromal cell- | 252/269 93 | Upregulated |
| | | | derived receptor-1 alpha | | |
| 29 | | AF035287 | Homo sapiens clone 23742 | 253/269 94 | Upregulated |
| 30 | MatchGene | M90357 | Human basic transcription | 99/101 98 | Downregulated |
| | | | factor 3a (BTF3a) | | |
| 31 | | X74070 | Homo sapiens mRNA for | 87/89 97 | Downregulated |
| | | | transcription factor BTF3 | | |
| 32 | | AC000403 | Genomic sequence for Human 13 | 96/104 92 | Downregulated |
| 33 | | AL121766 | Human chromosome 14 BAC R- | 81/91 89 | Downregulated |
| | | | 412H8 library RPCI-11 | | |
| 34 | MatchGene | Y11307 | Homo sapiens CYR61 mRNA | 273/274 99 | Upregulated |
| 35 | | Z98053 | Homo sapiens mRNA for hCYR61 | 269/270 99 | Upregulated |
| | | | protein | | |

[0164] TABLE 1

| | | | | | |
|---|---|---|---|---|---|
| 36 | | Y12084 | Homo sapiens mRNA for gig 1 protein | 269/270 99 | Upregulated |
| 37 | | U62015 | Homo sapiens Cyr61 mRNA | 269/270 99 | Upregulated |
| 38 | | AF031385 | Homo sapiens Cyr61 protein (CYR61) mRNA | 269/270 99 | Upregulated |
| 39 | MatchGene | AF015257 | Homo sapiens flow-induced endothelial G | 376/378 99 | Upregulated |
| | | | protein-coupled receptor (FEG-1) | | |
| 40 | | U63917 | Human GPCR-Br | 376/380 98 | Upregulated |
| 41 | MatchGene | AF177394 | Homo sapiens dickkopf-1 (DKK-1) | 243/243 100 | Upregulated |
| 42 | | AF127563 | Homo spiens Sk/Dkk-1 protein precursor | 243/243 100 | Upregulated |
| 43 | MatchGene | U17077 | Human BENE | 140/143 97 | Upregulated |
| 44 | | U17079 | Homo sapiens clone P607 4-4 non-V kappa | 131/14292 | Upregulated |
| | | | IgK | | |
| 45 | MatchGene | D83402 | Homo sapiens gene for prostacyclin synthase | 362/373 97 | Downregulated |
| 46 | | AL118525 | Homo sapiens sequence from clone RP11-298O6 | 364/373 97 | Downregulated |
| | | | on chromosome 20 | | |
| 47 | | AC006957 | Homo sapiens chromosome 5q, BAC clone 104n10 | 306/322 95 | Downregulated |
| | | | (LBNL H295) | | |
| 48 | MatchGene | L43821 | Homo sapiens enhancer of filimentation (HEF1) | 372/399 93 | Upregulated |
| 49 | | U64317 | Human Crk-associated substrate related protein | 177/179 98 | Upregulated |
| | | | Cas-L | | |
| 50 | | AL136139 | Human clone RP4-761I2 on chromosome 6.3′ | 372/396 93 | Upregulated |
| | | | HEF1 | | |
| 51 | MatchGene | AJ245902 | Homo sapiens partial mRNA for Claudin-11 | 400/401 99 | Downregulated |
| | | | protein (CLDN11 gene) | | |
| 52 | | AF085871 | Homo sapiens full length insert cDNA clone | 404/405 99 | Downregulated |
| | | | Y011A01 | | |
| 53 | | AC008041 | Homo sapiens 3q26.2-27 BAC RPCI11-469J4 | 404/405 99 | Downregulated |
| 54 | MatchGene | AF073515 | Homo sapiens cytokine type-1 receptor | 128/128 100 | Upregulated |
| | | | precursor | | |
| 55 | | AF178684 | Homo sapiens class I cytokine receptor | 126/126 100 | Upregulated |
| | | | (zcytor5) | | |
| 56 | | AF059293 | Homo sapiens cytokine-like factor-1 | 125/125 100 | Upregulated |
| | | | precursor | | |
| 57 | | AC003112 | Human DNA chromosome specific cosmid | 125/125 100 | Upregulated |
| | | | R30292 | | |
| 58 | MatchGene | AF182032 | Homo sapiens protein kinase inhibitor | 96/98 97 | Downregulated |
| | | | gamma | | |
| 59 | | AB019517 | Homo sapiens PKIG | 95/98 96 | Downregulated |
| 60 | | M13792 | Human adenosine deaminase gene | 93/94 98 | Downregulated |
| 61 | | Z97053 | Human DMA sequence clone RP1-179M20 on | 93/94 98 | Downregulated |
| | | | chromosome 20 | | |
| 62 | MatchGene | AB018356 | Homo sapiens mRNA for GM3 synthase | 415/416 99 | Downregulated |
| 63 | | AF119415 | Homo sapiens GM3 synthase | 417/420 99 | Downregulated |
| 64 | | AF119418 | Homo sapiens nonfunctional GM3 synthase | 417/420 99 | Downregulated |
| 65 | | AF119417 | Homo sapiens nonfunctional GM3 synthase | 417/420 99 | Downregulated |
| 66 | | AF161396 | Homo sapiens HSPC278 | 419/420 99 | Downregulated |
| 67 | MatchGene | AF200348 | Homo sapiens melanoma-associated antigen | 131/132 99 | Upregulated |
| | | | MG50 | | |
| 68 | | AL109748 | Homo sapiens chromosome 21 PAC RPCIP704 | 55/74 74 | Upregulated |
| | | | M13256Q2 | | |
| 69 | MatchGene | M22960 | Human protective protein | 211/212 99 | Downregulated |
| 70 | | AF086236 | Homo sapiens full length insert cDNA | 215/217 99 | Downregulated |
| | | | clone ZD20E11 | | |
| 71 | | AL008726 | Human sequence from clone RP3-337O18 | 213/215 99 | Downregulated |
| | | | on chromosome 20q12-13.1 | | |
| 72 | | AF052157 | Homo sapines clone 24801 mRNA | 62/63 98 | Downregulated |
| 73 | | L26232 | Human phospholipid transfer protein | 60/61 98 | Downregulated |
| 74 | MatchGene | U03877 | Human extracellular protein (S1-5) | 344/348 98 | Downregulated |
| 75 | MatchGene | AB035480 | Homo sapiens mRNA for type 1 | 482/489 98 | Upregulated |
| | | | transmembrane protein | | |
| 76 | | AC004643 | Homo sapiens chromosome 16, cosmid | 485/488 99 | Upregulated |
| | | | clone 363E3 (LANL) | | |
| 77 | | AF191148 | Homo sapiens type 1 transmembrane | 484/489 98 | Upregulated |
| | | | protein Fn14 | | |
| 78 | MatchGene | D84342 | Homo sapines for SM22 alpha | 429/439 97 | Upregulated |
| 79 | | M95787 | Human 22 kDa smooth muscle protein | 609/621 98 | Upregulated |
| 80 | | D17409 | Homo sapiens mRNA for SM22 alpha | 612/621 98 | Upregulated |
| 81 | MatchGene | AF166125 | Homo sapiens selenoprotein N | 90/96 93 | Downregulated |
| 82 | | AL110205 | Homo sapiens mRNA; cDNA DKFZp586L1722 | 91/96 94 | Downregulated |
| 83 | | AL020996 | Human DNA sequence clone RP1-317E23 | 89/94 94 | Downregulated |
| | | | on chromosome 1p36.13. | | |
| 84 | | AC010485 | Homo spiens chromosome 19 clone CTD- | 58/88 65 | Downregulated |
| | | | 2329C7 | | |
| 85 | MatchGene | L11066 | Human mRNA sequence (peptide-binding | 155/155 100 | Upregulated |
| | | | protein 74) | | |
| 86 | | AL035091 | Human DNA sequence form clone 8L2 on | 146/154 94 | Upregulated |
| | | | chromosome 1q32.2-q32.3 contains CD34 | | |
| 87 | MatchGene | X51521 | Human mRNA for ezrin | 143/144 99 | Upregulated |
| 88 | | J05021 | Human cytovillin 2 (VIL2) | 73/74 | Upregulated |
| 89 | | AL162086 | Homo sapiens cDNA DKFZp762H157 | 151/155 97 | Upregulated |
| 90 | MatchGene | U89942 | Human lysyl oxidase-related protein | 362/365 99 | Upregulated |
| | | | (WS9-14) | | |
| 91 | | AF117949 | Homo sapiens lysyl oxidase-like | 364/370 98 | Upregulated |
| | | | protein 2 (LOXL2) | | |
| 92 | MatchGene | X76534 | Homo sapiens NMB mRNA | 401/401 100 | Downregulated |
| 93 | | AC005082 | Homo sapiens clone RG271G13 | 401/401 100 | Downregulated |
| 94 | MatchGene | U07802 | Human Tis11d gene | 215/219 98 | Downregulaled |
| 95 | MatchGene | X14958 | Human high mobility group protein | 142/143 99 | Downregulated |
| 96 | | X14957 | Human high mobility group protein | 142/143 99 | Downregulated |
| 97 | | M23615 | Human HMG-Y protein isoform | 139/139 100 | Downregulated |
| 98 | | M23617 | Human HMG-Y protein isoform | 139/139 100 | Downregulated |
| 99 | | M23618 | Human HMG-Y protein isoform | 139/139 100 | Downregulated |
| 100 | MatchGene | M64347 | Human novel growth factor receptor | 249/249 100 | Upregulated |
| 101 | MatchGene | M76979 | Homo sapiens pigment epithelium- | 647/663 97 | Downregulated |
| | | | differentiation factor | | |
| 102 | | M90439 | Human molecular marker (EPC-1) | 646/663 97 | Downregulated |
| | | | gene | | |
| 103 | | U29953 | Human pigment epithelium derived | 354/365 96 | Downregulated |
| | | | factor | | |
| 104 | MatchGene | AL133105 | Homo sapiens; cDNA DKFZp434F2322 | 266/272 97 | Downregulated |
| 105 | | AC005799 | Homo sapiens chromosome 17, clone | 264/271 97 | Downregulated |
| | | | hRPK.62 F 10 | | |
| 106 | MatchGene | AL049389 | Homo sapiens cDNA DKFZp586O0118 | 333/335 99 | Downregulated |
| 107 | | AL109718 | Homo sapiens clone EUROIMAGE | 330/332 99 | Downregulated |
| | | | 668307 | | |
| 108 | | AK000465 | Homo sapiens cDNA FLJ20458 fis, | 330/332 99 | Downregulated |
| | | | clone KAT05904 | | |
| 109 | | AL359061 | Homo sapiens clone-EUROIMAGE 2155535 | 329/331 99 | Downregulated |
| 110 | | AB033025 | Homo sapiens mRNA for KIAA1199 protein | 329/331 99 | Downregulated |
| 111 | MatchGene | AL080214 | Homo sapiens mRNA; cDNA DKFZp586l2223 | 259/261 99 | Downregulated |
| 112 | | AK000710 | Homo sapiens cDNA FLJ20703 fis, clone | 262/266 98 | Downregulated |
| | | | KAIA1965 | | |
| 113 | | AF124432 | Homo sapiens HOM-TES-103 tumor antigen | 258/261 98 | Downregulated |
| 114 | | AC006064 | Homo sapiens 12p13.3 PAC RPCI5-940J5 | 259/261 99 | Downregulated |
| 115 | MatchGene | AF052094 | Homo sapiens clone 23698 | 280/280 100 | Upregulated |
| 116 | | AF119117 | Homo sapiens dopamine transporter | 54/73 73 | Upregulated |
| 117 | MatchGene | AL050228 | Homo sapiens mRNA; cDNA DKFZp586O2223 | 343/345 99 | Upregulated |
| 118 | Related To | M15917 | Rat serine protease inhibitor 1 mRNA | 139/146 95 | Upregulated |
| 119 | | D00752 | Rat mRNA for contrapsin-like protease | 137/137 100 | Upregulated |
| | | | inhibotor related protein (Cpi-23) | | |
| 120 | | X16357 | Rat mRNA for SPI-1 serine protease | 139/147 94 | Upregulated |
| | | | Inhibitor | | |
| 121 | Related To | L35108 | Rattus norvegicus water channel protein | 183/260 70 | Downregulated |
| | | | (AQP3) gene | | |
| 122 | | D17695 | Rat mRNA for water channel aquaporin 3 | 180/255 70 | Downregulated |
| | | | (AQP3) | | |
| 123 | | AF104416 | Mus musculus aquaporin-3 mRNA | 117/172 68 | Downregulated |
| 124 | Related To | S78079 | Scleraxis + basic helix − loop − helix | 117/161 72 | Upregulated |
| | | | transcription factor [mice, embryos, | | |
| | | | mRNA] | | |
| 125 | Related To | D14313 | Chicken mRNA for deltaEF1 | 196/214 91 | Downregulated |
| 126 | | D76434 | Chicken gene for transcriptlonal repressor | 201/220 91 | Downregulated |
| | | | deltaEF1, exon 2-exon 9. | | |
| 127 | | L13856 | Mesocricetus auratus (hamster) DNA binding | 190/215 88 | Downregulated |
| | | | protein (BZP) mRNA | | |
| 128 | Related To | AF012923 | Mus musculus p53-inducible zinc finger | 227/326 69 | Downregulated |
| | | | protein (Wig-1) mRNA | | |
| 129 | MatchEST | N21464 | yx57d09.s1 Soares melanocyte 2NbHM | 470/504 93 | Downregulated |
| | | | Homo sapiens cDNA clone | | |
| 130 | MatchEST | AI081618 | ow77c02.s1 Soares fetal liver spleen 1NFLS | 231/236 97 | Upregulated |
| | | | S1 Homo sapiens cDNA clone | | |
| 131 | MatchEST | AI869864 | w m07c12.x1 NCI CGAP Ut4 Hs cDNA clone | 111/111 100 | Downregulated |
| | | | IMAGE: 2435254 3′ | | |
| 132 | MatchEST | AI769341 | w g36g07.x1 Soares NSF F8 9W OT PA P S1 | 186/186 100 | Upregulated |
| | | | Homo sapiens cDNA clone similar to gb: | | |
| | | | S65738 DESTRIN (Human) | | |
| 133 | MatchEST | AI343901 | qp12h11.x1 NCI CGAP KidS Homo sapiens | 342/371 92 | Upregulated |
| | | | cDNA clone | | |
| 134 | MatchEST | AA808622 | oe56c12.s1 NCI CGAP Lu5 Homo sapiens | 151/152 99 | Downregulated |
| | | | cDNA clone | | |
| 135 | MatchEST | AA564610 | nj02f05.s1 NCI CGAP Pr21 Homo sapiens | 128/130 98 | Downregulated |
| | | | cDNA clone | | |
| 136 | MatchEST | AA722810 | zg81h01.s1 Soares fetal heart NbHH19W | 307/307 100 | Upregulated |
| | | | Homo sapiens cDNA | | |
| 137 | MatchEST | AA417890 | zv05d12.s1 Soares NhHMPu S1 Homo sapiens | 247/248 99 | Downregulated |
| | | | cDNA clone | | |
| 138 | MatchGene | D50683 | Homo sapiens mRNA for TGF-betallR alpha | 343/348 98 | Downregulated |
| 139 | MatchGene | X86163 | H. sapiens mRNA for B2-bradykinin receptor | 204/209 97 | Downregulated |
| 140 | RelatedTo | AF026692 | Homo sapiens frizzled related protein | 66/103 64 | Downregulated |
| | | | frpHE mRNA | | |
| 141 | RelatedTo | E28892 | Member of FRZB family. FRAZZLED | 48/58 82 | Downregulated |
| 142 | MatchGene | L19872 | Human AH-receptor mRNA | 230/233 98 | Downregulated, Up- |
| 143 | MatchGene | X71973 | H. sapiens GPx-4 mRNA for phospholipid | 78/80 97 | Downregulated |
| | | | hydroperoxide glutathione peroxidase | | |
| 144 | MatchGene | AF060973 | HS selenium-dependent phospholipid | 72/73 98 | Downregulated |
| | | | hydroperoxide glutathione peroxidase | | |
| 145 | MatchGene | V00510 | Human gene for preproenkephalin | 582/602 96 | Upregulated |
| 146 | MatchGene | J00123 | Human enkeptialin gene | 582/602 97 | Upregulaled |
| 147 | MatchGene | K00469 | human enkephalin gene | 581/601 96 | Upregulated |
| 148 | MatchGene | U13660 | Human cartilage-derived morphogenetic | 601/627 96 | Downregulated |
| | | | protein 1 (CDMP-1) mRNA | | |
| 149 | MatchGene | X80915 | HS Gdf5 gene | 605/627 96 | Downregulated |

What is claimed is:

1. A method of screening for an agent that modulates the differentiation of precursor stem cells into osteoblasts, comprising:
(a) preparing a first gene or gene family expression profile of a cell population comprising precursor stem cells and/or assaying an activity of a protein encoded by at least one gene or a member of a gene family of Table 1 of a cell population comprising precursor stem cells;
(b) exposing the cell population to the agent;
(c) preparing second gene or gene family expression profile of the agent exposed cell population and/or assaying an activity of a protein encoded by at least one gene or a member of a gene family of Table 1 of the exposed cell population; and
(d) comparing the first and second expression profiles or first and second activities to an expression profile and/or an activity of an osteoblast cell population.

2. A method of claim 1, wherein the gene expression profiles comprise the expression levels for a set of genes that are differentially regulated in precursor stem cells compared to osteoblasts.

3. A method of claim 1, wherein the agent modulates the level of expression or activity for at least one gene in the precursor stem cell population to the expression level found in an osteoblast cell population.

4. A method of claim 1, wherein the gene expression profiles or activity level comprise the expression or activity levels in a cell of at least two genes or members of a gene family in Table 1.

5. A method of diagnosing a condition characterized by abnormal deposition of bone tissue, comprising detecting in a tissue sample the level of expression of and/or activity of a protein encoded by at least one gene or member of a gene family of Table 1, wherein differential expression or activity of the gene or member of a gene family is indicative of abnormal bone tissue deposition.

6. A method of monitoring the treatment of a patient with a condition characterized by abnormal bone tissue deposition, comprising:
(a) administering a pharmaceutical composition to the patient;
(b) preparing a gene expression profile from a cell or tissue sample from the patient and/or assaying an activity of a protein encoded by at least one gene or a member of a gene family of Table 1; and
(c) comparing the patient expression profile or activity to an expression profile or activity from a precursor stem cell population or an osteoblast cell population.

7. A method of treating a patient with a condition characterized by an abnormal deposition of bone tissue, comprising:
(a) administering to the patient a pharmaceutical composition, wherein the composition alters the expression and/or activity of a protein encoded by at least one gene or member of a gene family in Table 1;
(b) preparing a gene expression profile from and/or assaying an activity in a cell or tissue sample from the patient comprising precursor stem cells; and
(c) comparing the patient expression profile and/or activity to a gene expression profile or activity from an untreated cell population comprising precursor stem cells.

8. A method of diagnosing a condition characterized by an abnormal rate of formation of osteoblasts, comprising detecting in a tissue sample a level of expression of and/or activity of a protein encoded by at least one gene or member of a gene family from Table 1, wherein differential expression and/or activity of the gene or member of a gene family is indicative of an abnormal rate of formation of osteoblasts.

9. A method of monitoring the treatment of a patient with a condition characterized by abnormal rate of formation of osteoblasts, comprising:
(a) administering a pharmaceutical composition to the patient;
(b) preparing a gene expression profile and/or assaying an activity of at least one gene or member of a gene family from Table 1 in a cell or tissue sample from the patient; and
(c) comparing the patient gene expression profile and/or activity to a gene expression profile or activity from a precursor stem cell population or an osteoblast cell population.

10. A method of treating a patient with a condition characterized by an abnormal rate of formation of osteoblasts, comprising:
(a) administering to the patient a pharmaceutical composition, wherein the composition alters the expression and/or activity of at least one gene or member of a gene family in Table 1;
(b) preparing a gene expression profile and/or assaying an activity in a cell or tissue sample from the patient comprising precursor stem cells; and
(c) comparing the patient expression profile and/or activity to a gene expression profile or activity from an untreated cell population comprising precursor stem cells.

11. A method of diagnosing osteoporosis in a patient, comprising detecting the level of expression and/or activity in a tissue sample of at least one gene or member of a gene family from Table 1; wherein differential expression or activity is indicative of osteoporosis.

12. A method of monitoring the treatment of a patient with osteoporosis, comprising:
(a) administering a pharmaceutical composition to the patient;
(b) preparing a gene expression profile and/or assaying an activity of at least one gene or member of a gene family of Table 1 in a cell or tissue sample from the patient; and
(c) comparing the patient gene expression profile and/or activity to a gene expression profile or activity in a precursor stem cell population or an osteoblast cell population.

13. A method of treating a patient with osteoporosis, comprising:
(a) administering to the patient a pharmaceutical composition, wherein the composition alters the expression and/or activity of at least one gene or member of a gene family in Table 1;
(b) preparing a gene expression profile and/or assaying an activity from a cell or tissue sample from the patient comprising precursor stem cells; and
(c) comparing the patient expression profile and/or activity to a gene expression profile or activity from an untreated cell population comprising precursor stem cells.

14. A method of screening for an agent capable of ameliorating the effects of osteoporosis, comprising:
(a) exposing a cell to the agent; and
(b) detecting the expression and/or activity level of one or more-genes or members of a gene family of Table 1.

15. A method of monitoring the progression of bone tissue deposition in a patient, comprising detecting the level of expression and/or activity in a tissue sample of at least one gene or member of a gene family from Table 1; wherein differential expression and/or activity is indicative of bone tissue deposition.

16. A method of screening for an agent capable of modulating the deposition of bone tissue, comprising:
(a) exposing a cell to the agent; and
(b) detecting the expression and/or activity level of at least one gene or member of a gene family of Table 1.

17. The method of any one of claims 1-16, wherein expression and/or activity levels of at least 2 genes are detected

18. The method of any one of claims 1-16, wherein expression and/or activity levels of at least 3 genes are detected.

19. The method of any one of claims 1-16, wherein expression and/or activity levels of at least 4 genes are detected.

20. The method of any one of claims 1-16, wherein expression and/or activity levels of at least 5 genes are detected.

21. The method of any one of claims 1-16, wherein expression and/or activity levels of at least 6 genes are detected.

22. The method of any one of claims 1-16, wherein expression and/or activity levels of at least 7 genes are detected.

23. The method of any one of claims 1-16, wherein expression and/or activity levels of at least 8 genes are detected.

24. The method of any one of claims 1-16, wherein expression and/or activity levels of at least 9 genes are detected.

25. The method of any one of claims 1-16, wherein expression and/or activity levels of at least 10 genes are detected.

26. The method of any one of claims 1-16, wherein expression and/or activity levels of all the genes in Table 1 are detected.

27. A composition comprising at least two oligonucleotides, wherein each of the oligonucleotides comprises a sequence that specifically hybridizes to a gene or member of a gene family of Table 1.

28. A composition according to claim 27, wherein the composition comprises at least 3 oligonucleotides, wherein each of the oligonucleotides comprises a sequence that specifically hybridizes to a gene or member of a gene family of Table 1.

29. A composition according to claim 27, wherein the composition comprises at least 5 oligonucleotides, wherein each of the oligonucleotides comprises a sequence that specifically hybridizes to a gene or member of a gene family of Table 1.

30. A composition according to claim 27, wherein the composition comprises at least 7 oligonucleotides, wherein each of the oligonucleotides comprises a sequence that specifically hybridizes to a gene or member of a gene family of Table 1.

31. A composition according to claim 27, wherein the composition comprises at least 10 oligonucleotides, wherein each of the oligonucleotides comprises a sequence that specifically hybridizes to a gene or member of a gene family of Table 1.

32. A composition according to any one of claims 27-31, wherein the oligonucleotides are attached to a solid support.

33. A composition according to claim 32, wherein the solid support is selected from a group consisting of a membrane, a glass support, a filter, a tissue culture dish, a polymeric material and a silicon support.

34. A solid support to which is attached at least two oligonucleotides, wherein each of the oligonucleotides comprises a sequence that specifically hybridizes to a gene or member of a gene family of Table 1.

35. A solid support according to claim 34, wherein at least one oligonucleotide is attached covalently.

36. A solid support according to claim 34, wherein at least one oligonucleotide is attached non-covalently.

37. A solid support of claim 34, wherein the solid support is an array comprising at least 10 different oligonucleotides in discrete locations per square centimeter.

38. A solid support of claim 34, wherein the array comprises at least 100 different oligonucleotides in discrete locations per square centimeter.

39. A solid support of claim 34, wherein the array comprises at least 1000 different oligonucleotides in discrete locations per square centimeter.

40. A solid support of claim 34, wherein the array comprises at least 10,000 different oligonucleotides in discrete locations per square centimeter.

41. A computer system comprising:
(a) a database containing information identifying the expression and/or activity level in osteoblasts of a set of genes comprising one or more genes or members of a gene family in Table 1; and
(b) a user interface to view the information.

42. A computer system of claim 41, wherein the database further comprises sequence information for the genes or gene families.

43. A computer system of claim 41, wherein the database further comprises information identifying the expression and/or activity level in precursor stem cells of at least one gene or member of a gene family of Table 1.

44. A computer system of claim 41, wherein the database further comprises information identifying the expression level a set of genes indicative of a condition characterized by abnormal bone tissue deposition.

45. A computer system of any of claims 4144, further comprising records including descriptive information from an external database, which information correlates said genes to records in the external database.

46. A computer system of claim 45, wherein the external database is GenBank.

47. A method of using a computer system of any one of claims 41-44 to present information identifying the expression level in a tissue or cell of a set of genes comprising at least two of the genes or members of gene families in Table 1, comprising:
(a) comparing the expression level of at least one gene or member of a gene family in Table 1 in the tissue or cell to the level of expression of the gene in the database.

48. A method of claim 47, wherein the expression levels of at least two genes are compared.

49. A method of claim 47, wherein the expression levels of at least five genes are compared.

50. A method of claim 47, wherein the expression levels of at least ten genes are compared.

51. A method of claim 47, further comprising the step of displaying the level of expression of at lest one gene in the tissue or cell sample compared to the expression level in osteoblasts.

The application's sequence listing, which the Patent Office published only in electronic form, follows.

SEQUENCE LISTING (149 sequences)

SEQ ID NO: 1 - DNA, 3097 bp, Homo sapiens
  Genbank Accession No. X53390
gccagacaaagcccgagatggcgaagcggagcgacggctaatggcgagccccacgcgccgcgctccgcccgccccgctccggtgaggtggctttgaccccgggttgcccggccagcacgaccgaggaggtggctggacagctggaggatgaacggagaagccgactgccccacagacctggaaatggccgcccccaaaggccaagaccgttggtcccaggaagacatgctgactttgctggaatgcatgaagaacaaccttccatccaatgacagctccaagttcaaaaccaccgaatcacacatggactgggaaaaagtagcatttaaagacttttctggagacatgtgcaagctcaaatgggtggagatttctaatgaggtgaggaagttccgtacattgacagaattgatcctcgatgctcaggaacatgttaaaaatccttacaaaggcaaaaaactcaagaaacacccagacttcccaaagaagcccctgaccccttatttccgcttcttcatggagaagcgggccaagtatgcgaaactccaccctgagatgagcaacctggacctaaccaagattctgtccaagaaatacaaggagcttccggagaagaagaagatgaaatatattcaggacttccagagagagaaacaggagttcgagcgaaacctggcccgattcagggaggatcaccccgacctaatccagaatgccaagaaatcggacatcccagagaagcccaaaaccccccagcagctgtggtacacccacgagaagaaggtgtatctcaaagtgcggccagatgccactacgaaggaggtgaaggactccctggggaagcagtggtctcagctctcggacaaaaagaggctgaaatggattcataaggccctggagcagcggaaggagtacgaggagatcatgagagactatatccagaagcacccagagctgaacatcagtgaggagggtatcaccaagtccaccctcaccaaggccgaacgccagctcaaggacaagtttgacgggcgacccaccaagccacctccgaacagctactcgctgtactgcgcagagctcatggccaacatgaaggacgtgcccagcacagagcgcatggtgctgtgcagccagcagtggaagctgctgtcccagaaggagaaggacgcctatcacaagaagtgtgatcagaaaaagaaagattacgaggtggagctgctccgtttcctcgagagcctgcctgaggaggagcagcagcgggtcttgggggaagagaagatgctgaacatcaacaagaagcaggccaccagccccgcctccaagaagccagcccaggaagggggcaagggcggctccgagaagcccaagcggcccgtgtcggccatgttcatcttctcggaggagaaacggcggcagctgcaggaggagcggcctgagctctccgagagcgagctgacccgcctgctggcccgaatgtggaacgacctgtctgagaagaagaaggccaagtacaaggcccgagaggcggcgctcaaggctcagtcggagaggaagcccggcggggagcgcgaggaacggggcaagctgcccgagtcccccaaaagagctgaggagatctggcaacagagcgttatcggcgactacctggcccgcttcaagaatgaccgggtgaaggccttgaaagccatggaaatgacctggaataacatggaaaagaaggagaaactgatgtggattaagaaggcagccgaagaccaaaagcgatatgagagagagctgagtgagatgcgggcacctccagctgctacaaattcttccaagaagatgaaattccagggagaacccaagaagcctcccatgaacggttaccagaagttctcccaggagctgctgtccaatggggagctgaaccacctgccgctgaaggagcgcatggtggagatcggcagtcgctggcagcgcatctcccagagccagaaggagcactacaaaaagctggccgaggagcagcaaaagcagtacaaggtgcacctggacctctgggttaagagcctgtctccccaggaccgtgcagcatataaagagtacatctccaataaacgtaagagcatgaccaagctgcgaggcccaaaccccaaatccagccggactactctgcagtccaagtcggagtccgaggaggatgatgaagaggatgaggatgacgaggacgaggatgaagaagaggaagatgatgagaatggggactcctctgaagatggcggcgactcctctgagtccagcagcgaggacgagagcgaggatggggatgagaatgaagaggatgacgaggacgaagacgacgacgaggatgacgatgaggatgaagataatgagtccgagggcagcagctccagctcctcctcctcaggggactcctcagactctgactccaactgaggctcagccccaccccagggcagccagggagagcccaggagctcccctccccaactgaccacctttgtttctcccccatgttctgtcccttgcccccctggcctcccccactttctttctttctttaaaaaaaaaaaaaaaaatacggtgggggtagggggctggaggagcccaggccaggactctgcagcctcagagacatcagcccttgggggtcctcctccagggacagcaactatcagactaagccagcaccggaccagcctggcccaccccacccacttctgcacttgcggttccggcatggacaatggaccggagagtgggggtggggggtcccaaagagtttgatgaggccctccacacctgcggcccaatccaaggtggggtggaagcttggggaagacccattccttcccagaggggcctgccacctggacccctgcattggaactggaggcagggaacatggggaggaggagggtcggtgccttcaagaaaacaggcactgccctggtggccctctcccctgccccctgcaggaaggagctgcctggacccgttcatgggggagggggcagaagtgttttttatatatgtgtatatatttttttttaagctctgagctgtcaacgagacgtttcctaccgaaaaa

SEQ ID NO: 2 - DNA, 3097 bp, Homo sapiens; identical to SEQ ID NO: 1
  Genbank Accession No. X53461

SEQ ID NO: 3 - DNA, 92638 bp, Homo sapiens
  Genbank Accession No. AC004596
aagcttgtcctaaaacccggaaggcccttgcggagcatggagatcggataaggcggggtgctcccccggttttccgatgtgttgcaaatctaagagcttctttctcgctttttttttccctgtaactacccccccccccttttgcttcagggttgcaaaagcaaagagcaattaaaaaaaaaaaaccgcgcacacactcagacacacaccagtggcgacaggggagagttggaaagacgcaggagagaagcaggaggcaggaggcagcggggatggagcaatgggagcgggaagcaggcaggtttccttgcaaatccccctccggcctcacgccgtctcgccggccccggcaggggagcgaggaccccggcgaacagatggaggagtggagctcgctctaggcagctgggcttggccggagaatggaggagccaccaagcgaccggctgattggaagagaaacgcagagcgatggaggcggggtaggaggacgatttctctgcggggactggcggcggcgtacacgcccgggtcgggcgctgcagagcttggctggctttcaacccgcgctcgccggctccagccccgcgcgcccccacccctagccctcccggcggctccgcaggtgagtgcgagctgggggcagaaatatccaaaagtctcaacatgcccgccctgcaaaaagaaaaaaaaaagacgaaaaccatttttctttaaaaaaaaaaaattttttttgtgcaacccctagagcagtgggagggaaggggtgaggctgagccgcccggaggaggcggaggggccaggcgaggccggggtggcccgggaggcggcggcgccgaggcggctctgacgggcaagcgctcggagcggcgctgcgctgcgccgaggcgggcgggcgggcgggcggagcggggcgggcggagcgcggcgcgtggggctcgccattagccgtcgctccgcttcgccatctcgggctttgtctggcgactcgctgccccggcgtcggctgcagcggagctgcggctcgactgttcggcccgccgtgctcccaggtgcccccggcctgcgctcccatccacacgctcggtaagtgagcccgggagccgcggatttcgggggagaggggttgctacgagtggcggcggcgccgatcttcatgcgcccgggcaggcctggagaaccatgccgggctggattgaaccggctcccacagcggcccctccgccggagcccgtcgttcccttgccgtttccggggtgtaaagagcaacggggattttttttttttaatgcagaggttttagttttcgggtttttttttaagtttcgtatgtgccgttcggcaaggagaggaccgcgaggtaggcaccgaagctggacgccgcgatcggcgtgcgtgcgccccaaaccagcggccacgctccgggggatgagggtgggcgcggaccgctcgctccgggaggcgggagagagctggcctggaagccctagtctgagctgggagaacttgggggagagctccggagcagggctgtgggcgccccccgagcctccccggacgccgggggcacctccgggcaccctctccgcggccgcacctcggccctccctcgccggcgaagcctgctagttcccccgcgggtctggcgaggtcgctctcggcgcccgcccgcccgcctaggctccgagccccgccgccatccgggcggctgcgtgtctccctgccccggcccccccccccttccccggcggcggcagcagcagcagcagcagccgccgccgccgccagcaccaccaccaccacccccctcccctccttccttccctccgcctcggccgcccgggtccccccagctcccgcccctcctcccagctgccccccgcggagcccgcccgggcaggctgtgggagggagcggagccggcgaggcgggcgggctggcgctcgctccccgggggtcggtgtgcgctctacggggaaggacgcgctcgctgccccgcttctcccgccccccctcccgctcctcctcctcccttctccctcctcctccccgctccggcggctgaggctgcggcggcggcggggggtgtgcgagctgaggccggggccggcggcgggcgggctgcctgcaggcggagggcgctgtgctttgtgcttttcgccgcgaggagcagcaggcagcagccacagccgccgccgccgccgccgccgccacagcagcagcagccgccgccccagcgccgccgcctcgcccggaggaggagccgctgccgccgcgggagggagctgcggctgtgcccggccgagcgggggagggcgccgccactcagagccagggagggagccgctggagcgggaagcccggaggccgcgctgcgccgggtaaccgaggcggctgaggacgcgcgctggggtcggggccggacggcgggagcgaaccgcggggtgcggtgggcgcccagcggggacccgaagcgaccaccgagcaggcgaccgggcgcgagcagaccagggcacttgggaggacgccgagagccgggggaggggaaggcaggaagcgaggcctgagccgagccccggccgctggcggaggagcccgcgcttctcggagccggcaggcgcagttctccccggccgccggagggggcggcggggccggtgagcgctgcgcccccgcctcccggccgccgtcctcccgccctctccttggctcggctccccggaggccggggcgggggcgccggcggggctgggccgcaggctcgggggaggaggcggcggttcccgccgcggtcgcgcctctgtgccgggctcctccgtgcgcgtcggggtggctgggcggtggcggcgcctctggccggggtgggtggctcgggggcggggggcaggctaggccgcttctctccggctgcttgcccgcctgtgcgggcggggacggcgaagggagcccgggaggggggagcggcgggaatccggatccggtccccgggggcggtgcggccgctccgctccggggctggcggcggctgcgctgcgtccgggtccccgccgggttgcggaggcggggggaaccggccggggggaggcgggaggaggagactggggcgcgtgcccgcttccgtggccgcgcgcgccctttacccgcccttcctcttcccccgccctccagcctggggcctccccggggcgggcgctccgaggaggaggagattttttctttttttttttttttggctggggttgggaagcggggcggagggcgggcgctcgctgcacgcgggagctaggagcaggccctcgcgtggccaggggagggcgcgcgccgcggagccgggctgcaggggctgggggagggggtcacgaggaagaggaggggcgcactcccattcccatagaccccttaagtctaataaggtcatggctgagtctctcagagtgtggacctgcccccttctactctgggcggttagaaagtcgttagtcgttcacctctcagccttcctgagtgggaactggtatgtcttccaaagggtgaggtggctttgaccccgggttgcccggccagcacgaccgaggaggtggctggacagctggaggatgaacggagaagccgactgccccacagacctggaaatggccgcccccaaaggccaaggtaggggcatccacccccggccctctgaaacttaaaccctctttccctcgtggctgcggggctcactcccttcttcaagggctttttcagtctgcatacactgaactgggggagaaagtgccttgagtatttatgaatcaagcatctcccacacttggggtttggctgaatccaaattatttggcctggagtggctcacctcccctctctccctgtccctcaccctctgtgttagaggaggcctgccttctggggttcccattcagcctgaagtgtgtcccagcccagtgtcctggaatgggaggaaggatgagtgtagaggaagggtcaggaaggggttggggaaggcttctcaggctttttaggaagaccatgaggcttttgtagaggcaggtggagaaaagggctgttttggtggttttaggccccaagccatgggatatatgtactcaactagatctctgcctcattcagcagtgatccagtctagatggggatagagagtaggatgaagctggacagctggccatgcttgtgggacattgaggggagaggggattatgggtccacgtggcccattctgcagaatctctggcccaggttaccagatgcaaatgaaaatggagagcccttttgacttctggccttgggtggctattctcccagcccatccacagtggcctagagctctctggggctgcatttcagtggctgaaaaataactgttccagacctgttcttgcttccctgggtagttgggctgacaagacagcttgtaattctgggggttctccctggagcagggccctgagagtttctgtgcacctgcctaccttgcctcagagctgccctgtatcctgcttctgcttctgtttcctttttcttatttgccagaaattctcccttgatctgctttaaggggctagggggtggtgggtgtctctaacattggtttccagctgtgcaggagagacatctgcatggattttccttactgtccacaccccattctcagtcgttgcacatttagaatatccactcagaacttgaacttggcagcacatttagatatattgcttccctgcttccctccttctctgacaagctacctcgtttcccacaaagccctgaatcactgtaccttcatttccacccctcttccccttacagcaaatagctgcccgttgcagcttggcacagtataaatgataatagccttgaagcaagccagacttgagttcgagcctggctttctaggtatagcatggtctggactggagtccctgccctgatccaatatggccacagtttccttagggctgagccatatcttgtctgtgccttcagatgggaagcaaccaggggctgggatgccctagggaggaagagttgagcactcaagaactggggaacagatcggggggatagcatgagccaggcatgatggcctctgttactctttaccagaccgttggtcccaggaagacatgctgactttgctggaatgcatgaagaacaaccttccatccaatgacagctccaagttcaaaaccaccgaatcacacatggactgggaaaaagtagcatttaaagacttttctggagacatgtgcaagctcaaatgggtggagatttctaatgaggtaactgatcccccttttctgacatacacacataccccccactcagcgtggtgggggaagtgaaacaggctgtaaacaggaaggaaagagaccaggagaggcattcatgtggtctcccgttagctctctacctgcccctttgcattttgggaggtggcacggttgacagcactggcttaaagttatgccactttctatctgagtggtcttgagccaaacagcctgagctgtgctgagattgacggaggtgctagcatgctgagattgacggaggtgttagcatggacaaccaggttgaggtcagttagtccccttgttgctggcctttggtgtgtactgactgcctgggcctctgcggtaggcatgggccagtgcctgggtgtcatgctgcctgcttcatttggctgttggcctctgctcttctttggtaaatttagtctagtaaagagtagaagagacccgttataagatgggggtatactactgtgtggcattttccttttcccaacttccccttcctcccacccctcttcctccaggtgaggaagttccgtacattgacagaattgatcctcgatgctcaggaacatgttaaaaatccttacaaaggcaaaaaactcaaggtgagttactaggaggaggagcatgaggggtatgggaggaaaggtccaaagaagggatgtatttgacctccattgtgtccttgtcccttcttccagaaacacccagacttcccaaagaagcccctgaccccttatttccgcttcttcatggagaagcgggccaagtatgcgaaactccaccctgagatgagcaacctggacctaaccaagattctgtccaagaaatacaaggagcttccggagaagaagaaggtggggggaggagagttaaggtgggaggaggggagaggctgggagcagctggtgtggtgtgggtcagttggaggtaggccttggagaaacctggcatcagggatgagggtgagtcagcacagcagaataggtcctgggcagccacacctgattgccccttcctcggcccacacatggtcaggcacaggcaccatcacagatgtaaaccagacagcaggtgctcagaccaacctttccccctacagaaaacccacagcattctgtttcaagctctctctcccccatacacccatcctcactgttaggctccgcagcacttcttcaccctctatgacgtttcccgtcatggtctcatttgatacttgcaatgtctttataaaggtaaccctaggaaaaggttatcccagttttgtgggcaaggaactgaggtgcaggagggttaagtgtcccgggtgacacaactattgatgctagagcaggatttagtgccccagagtcccagtccagtgctgttactgccacgtccacctgtgaagtgcacttctccacgcacacgtgttcactcaaggacacacattgtccctcctggcctcatactgttccttgcagaggtcgggcactgtcccagaccatcaaagcattaactctgggtggagggttgcctaagcctcccaggcagggctcagtcacagagctcaggaggtccctcccagagataggcagcaaaacattggaggagcctgcagatgggacacgaggaagatgggatggggacagaggacacaaagaagagacacgggacaaggagacagagccagggatagatggggaagggcagcaggaaagacaagaagcacatctgcttggagaggaaacaaagtcatacacagccagttctcaaaagggggcactggccgctgccatgctatgagtagccctttttcctggttggcataccctggctgcagactcacatgcccttggtgctgtacccaaaaaagccagctgtctgcaaccactgcccaagcagagaggggtatggattgctggaactgttgacccctttgatgaggatgttggacagttgactgcacacacccaaacactctcatgggatgggagggagaggccaagctctagagtcagagccagggaaggccagaagaaactggtagagtggacaaggtgctgtcctgggggacacaagacttgggcctgttctcctggctctgccactgaaccgctgtgtatggggcctttggtaagtcatttcacttctgtgggcctggtctttatgtgaggtgagccaggtctgtgtggtccccttcaggtctaaaactgttttgtctgaggaggactgagatgggggaagaggaggctgagctctgcttctggttttctgtgggaactgtgggaaaggagcactgcctttctatgcctggtgcttctataagaggcaggggttgggctcagttgccatgagctcctggcacctgccagtgccactcttgtgagcccgcgaggatgaaagaagagatggacattgtgtgggagccaagagagaaggtcgatgaggaagagaaagagacacattggaaaggaggaacaagaaggagactatggagaagtggggaaagatgcagggagggagtgaggtgagagtggggaggctaaaaagggggtgatgaagggaagggaagccaagtggtgggaaagaatgagtgggctgagggagggagggctggaggggccagacagccaggatcctggagaaagagaagaaggtgatggtgtgagaactgggcaggaagatgcagggtagctggctgagacttgtattggaagaactcgctctgggttcccctccacacaatctcccctcatgccttggaaacaggactcagcccagccctggccatagatgtagaggctacgtacaaggggacagactaatgtcagctgccacagacagtgagaagagggagtgacaggagcaaggcctgcacccgacgccactgtgagagttctatggtgttggagaaacgagtgggggaggctcagcgctgccactgcgcactgtgtgaccgtgggtaatgccatggcccccttctgggactcttgctcagaaggagagaataggatgtaggattcagtgtctgggcgacccctgcagctcccaccatctgtggtagaagccagcaggtctgctctgtggtgagtcccgccaggaggcgggcagggcgccagcctccactccctgcatcacagcgtgggaggcagaagagccagcgaggaggggtctgggtggccttcatagctcagggtgagatacccttgggtcctgagtgaccccatcccctcctccccccagatgaaatatattcaggacttccagagagagaaacaggagttcgagcgaaacctggcccgattcaggtaaggcagtggagcccagaggagggccacggggcactgggggcagcagaataggctaaccctggccagagccttgagtttgccatctctgaggcatggaagaggatgggtcacatgtgagccctagtgtgtcatgctcagggacagagacaggcaggcagccaccgtcccactgagccccagctgaaaggcccaggaggcttggtgggtggggcagctagcttgagtctgccctggcagcgtcccctgctgatccttgctccccgtgtcctggctagggaggatcaccccgacctaatccagaatgccaagaaatcggacatcccagagaagcccaaaaccccccagcagctgtggtacacccacgagaagaaggtgtatctcaaagtgcggccagatgtgagtgtccggccaagggttgggggtggaggatgcacggcggtggccaggggggagccgcgccaggtcggccgggcacggtgcaggggagcaggagaggaggcccctccccaggggtgggctgcatggacagggcccgggccagctggcgtgcaagcgtgtgcgtgtgtgcgtgcgtgtatgagccagtccccttgcacccaggcgggatccccgcctctccgccttcccctcctggcctgtgggggacactgatgtgacctcccatggcctgagggggcgggggcctctgtgcccccttcccccttcccccctccccctgcccctggctgcctgtgcgtgtctgacggcttttggtttgcaggccactacgaaggaggtgaaggactccctggggaagcagtggtctcagctctcggacaaaaagaggctgaaatggattcataaggccctggagcagcggaaggagtacgaggttaggcttccgctgcgctcctccccgtccggctcttcacgagcctctgccctccgactccgtggccaccgcactctgcgggaggtgtcactccccatccctctgttgagggaggggccttctgggcccctcacctctgcccctaccttccccaccccccacccccatgagatctcaggctagggcagggcagggcaccacgtctcgtgtgacaccactgacgcgcagccacccccagctttgctccctgcctgccctccccagcggctctccccctgcccctgccctagctaactccacaccccattgccctccgtccccccacctggctctgcaggagatcatgagagactatatccagaagcacccagagctgaacatcagtgaggagggtatcaccaagtccaccctcaccaaggccgaacgccagctcaaggacaagtttgacgggcgacccaccaagccacctccgtgagcgctgccctgggatgggtgggcgagtgggcagctgggaagttgggctgggctctgcaggtgagaaggcctgctgccctgctcgcttacgggctgcacctctctccccgcggctctgataggaacagctactcgctgtactgcgcagagctcatggccaacatgaaggacgtgcccagcacagagcgcatggtgctgtgcagccagcagtggaagctgctgtcccagaaggagaaggacgcctatcacaagaagtgtgatcaggtgagctgtggcaggggccaccctgccttggggttttgaagcatgaggtctgatcccatcttgggccagtcagtccctggtggcgtgtgccttgggtacctgcctccaatacagtgtggggctgggctgggcttagcaactgagcccgtccaggcagggagtccagcccacacccaggctctggaggcccgctgaaggtcactgtcctccgagtactgcagggtctgtggtgacactgtctccagactgatcctgactccactcactttcccagaaaaagaaagattacgaggtggagctgctccgtttcctcgaggtgagtgttcctccggtggggcagtgggcagagaagactgggacttggcaggcagagccctggtgagcccctggagatagggcaccatgcagtctgggtgccaggcatgcagccccgtgctcctctttcctgtccagagcctgcctgaggaggagcagcagcgggtcttgggggaagagaagatgctgaacatcaacaagaagcaggccaccagccccgcctccaagaagccagcccaggaagggggcaaggtgggcagagggtgcggccgcgcaggcgggggtgggcaagactgggctccctggcagcacccacggaccccgaccctctgcacctggacagggcggctccgagaagcccaagcggcccgtgtcggccatgttcatcttctcggaggagaaacggcggcagctgcaggaggagcggcctgagctctccgagagcgagctgacccgcctgctggcccgaatgtggaacgacctgtctgagaagaagaaggtcaggctgcctggcggagcgctgtgcccccaggggggctgccagggccccctcttccccttggcgggccgtgccacctcgcccctggccgcctgagccacgcggtgcctgggctgggacgtggggccggcgcccagcagccggaaggcgggaagctgtcagctgagcgccgcagaccaggcgggggcgagccccaggcgggagacatctgcaccagcccatgcttctgcccgccggcgggagcgcctgggctgctgcgcggggagcgcgcgccccctgggggtgggtggaaggctgacgcccgggccatccccgcaggccaagtacaaggcccgagaggcggcgctcaaggctcagtcggagaggaagcccggcggggagcgcgaggaacggggcaagctgcccgagtcccccaaaagagctgaggagatctggcaacagagcgttatcggcgactacctggcccgcttcaaggtgacaggggtgggaaagggtagtactgcagcctctagccccgggtgacccctcccacggctgatacccttattggtccccagaatgaccgggtgaaggccttgaaagccatggaaatgacctggaataacatggaaaagaaggagaaactgatgtggattaagaaggcagccgaagaccaaaagcgatatgaggtaggaatggggctggggccaccccattcattgaaagctcgggaactcccctttggttgggcagctctgagcaagaagtcccagccttggtctgtgactctcagcaagtctcagcttccttctctgaacctctgtctctcatcagtaaggtgggggtgacattgctaacctccaggctgactcggaggatgcgagcagttgtgaaagcacttgtaaactgtggtgcctgcctcagacgtgagctgttaggaagttgctcactagctacctgtttctcctcctccctggcacagaaaaagacagccagctaaggtgctgatggcatgaggcagaaggcagcagtattttgggggtgggactggggggtgagcgtgacctttctccctccagagagagctgagtgagatgcgggcacctccagctgctacaaattcttccaagaagatgaaattccagggagaacccaagaagcctcccatgtgagcctgggggttggagtctgccctggaggtcggggagggtcagggctggatggctgctttgttggggtcctgaccctccttctaccaacccacctcccaggaacggttaccagaagttctcccaggagctgctgtccaatggggagctgaaccacctgccgctgaaggagcgcatggtggagatcggcagtcgctggcagcgcatctcccagagccagaaggagcactacaaaaagctggccgaggagcagcaaaagcagtacaaggtgcacctggacctctgggttaaggtgagagggcaagggacccttggaaggaacagagaggcatcagactaagccagcaccatcctagcctggcccatccacccacttgtgctggctggtctcattcatgatttcattccatgccctcgcaatccttcaggataacggtcactatcacccttttatttttatttttttttttattttttgagacagtcttgctctcctgcccaggctggagtacagtggtgtagtctcggctcactgcaacctccacctcccaggttcaagcgattctccttccacagcctccagagtagctggggctacagacatgtaccaccacacctggctaatttttgtatttttagtagagatgggcaggctggtctcgaactcctgacctcatgtgatccgcccacctcggcctcccaaagcactgggactacaggcttgagccaccgtccgcagccactatcacccttttaaaaataaggaaaccaaggctcagagaggttaagtaacttgcccaaggtcacacagtaagtagaagaatccaaatcagactgccttttcctcccccatctgggaccacgggacctctcctagactcctggcctttgtgcttcccctctgtgctttggttgagtagtcagatctgtaaagtggagagaatcacctgtgtccttcccactcaccaaggcaggttggccaaggacccaggaagactgtggggatttgctgtttcaggagtttggtgagccccactgcctcatcgatggctcaagggtttggtgttggggtgtggttgatgatgccaggctgactcatcacgggggcacttctttggagtgaggaagactctgataggagcttccatttgcgaaaagcaacagggaaaatgtgaaaaccaatagtcttagtggtttagagaaggactctgggtatcagaagcagaaatactagggtttgggccagcgcagtggctcacgcctgtaatcctagcactttgggagcccaaggtatgaaggatcacttgaggccaggagttcaagaccatcctgggcaacatagtgagattgctgtctctacaaaaaattataaggtagcatggtgtggtggcacatgcctgtagtcccagctactctggaggctgagttggaaggatcacttgagcctgggaaggtcaaggctgcagtgagctgagattgtgccactgcactccagcctgggtgacagagcaagaccctgtttcaaaaaaaaaaaaaaaaaaaaaaaaaaaattagagctgtgttctcagatcccaggggctctctgcagagacccaaaatctagggagcctgggaggggtaagatggggtgatgatatataaatgctcagcccactgcctagcactgggccagcatgctcagtcagcagtagttggctatgttccaacccttgccgcttctgtctcccccagagcctgtctccccaggaccgtgcagcatataaagagtacatctccaatgtgagtctgggagcagagcagcagtggggtaggggtgggggaattcaggggtgtcgaactcatggctgccacctttgtgtccccatcctgcagaaacgtaagagcatgaccaagctgcgaggcccaaaccccaaatccagccggactactctgcagtccaagtcggtaaggagcccctcccagatgcaggggcgtggggcggggggcactgcctggaatggttgggcagagaccagagaccactgatgtgcctccatccctccaaggagtccgaggaggatgatgaagaggatgaggatgacgaggacgaggatgaagaagaggaagatgatgagaatggggactcctctgaagatggcggcgactcctctgagtccagcagcgaggacgagagcgaggatggggatgaggtggggcagacagggcacagtgggaggggaggggagtcctgccaggagggccacctggtgactccacatcctttctcaccccccagaatgaagaggatgacgaggacgaagacgacgacgaggatgacgatgaggatgaagataatgagtccgagggcagcagctccagctcctcctcctcaggggactcctcagactctgactccaactgaggctcagccccaccccagggcagccagggagagcccaggagctcccctccccaactgaccacctttgtttctcccccatgttctgtcccttgcccccctggcctcccccactttctttctttctttaaaaaaaaaaaaaaatacggtgggggtagggggctggaggagcccaggccaggactctgcagcctcagagacatcagcccttgggggtcctcctccagggacagcaactatcagactaagccagcaccggaccagcctggcccaccccacccacttctgcacttgcggttccggcatggacaatggaccggagagtgggggtggggggtcccaaagagtttgatgaggccctccacacctgcggcccaatccaaggtggggtggaagcttggggaagacccattccttcccagaggggcctgccacctggacccctgcattggaactggaggcagggaacatggggaggaggagggtcggtgccttcaagaaaacaggcactgccctggtggccctctcccctgccccctgcaggaaggagctgcctggacccgttcatgggggagggggcagaagtgttttttatatatgtgtatatatttttttttaagctctgagctgtcaacgagacgtttcctaccgatctcggctgccgtctctgttgtcatttctgggagagggagggtttaggggtagatttggaaccttttaaaaatggtcttgatgtatgtggaagagagtatgtgtatgtgtgttcctgtacatagcatgggtgcagctgtggatgtgtgcaaaagagtgtgagtgtgtgtgtgtgtgtgtaaaggggtctgtcctagagcccacatcagtttgttgtgaatctggaaaaagggtcggtgagggccgggagatgttgaccctggtgggagcaggctgaggctgccccgttctccacatcctctgttttgcccagtctctgattccattagggggagtgtgctgaagccattctcggatgcttcccagaccaggctccctctgccagagtcacatgcatccgagctgctggtctccattgtccagcaggaaggcggaaaggcaggcaagatggtgtgaagcttaaagcttgtatttgatggaaaaggtctcccctgttcatctgagaggccaagcctggccaccccaggctcagaacctgggcttcaagaaatgtgctgggagctcctaacttacacatccctccagccttccttgaatcctcccaccaccccctatttcctttaatttctcaggtctgctccctcctcccccaaccccacagctgggcaagaagtctgcaaaagctgcatctgcagctgtctctaactcttcccagccatctcccgtattttttggtaccttgattccttgactcttaataagccaagccaccttatctctgtagttcttatttttttgttgactaaatttggggggttcttttttatggtcatgtcactgacctattaaattggggcttggtgcttttccaccttccccctctgaatgaaagccaaggaatgggggaagagcgggaactctgccgcggaggtggagcaagaacggtgaagggccctggtcccagagaggctggtgggtccctctcccaaaggaaggcagacagtctctgctttgccttggaccttggtgctgggggtggggaggcctgggggggacactccccactcccattccccttcctttgtcctaatcctggaattaagtacaggggtttataggttctatttcttcccaagagccctgcaaagaaccccagtttcctatttggatgcccctacactgttgtgtttcagtggaatgtattttcatttaaaaacaactttgaatggggcactttttctttcctgttttaaaaattgaaaaattcttacagtacaaacaggactgtcagggtgggggtgttggtgctgtaagaggtcactcttgagtgcattttggcactgggatgggatggctggggtgggaagacccccatccccacccccaacttcttttctaatatttaaggagtgttttgtaggattcaacaaccaccacaacttgaatttgtatcatgggaggtgggagggagtggcttagaggtgtctgcctatgcttaaagccaactgtggaagttttgttttcccttttttgtataataaagtgaaaaacaaaggtttgactgctgtctggtcactggaatcaatgaaggttcacaggggtgacccaacaggtttgatctataaaaatgcttgaagccaatttgccttttcttcctagaactatcttcctcttccctaaagattccataggcaacctaccttcacattgttctgtgctactgttcttgcccttttctcaattccatttgttcaccttgggttgtgagaccactaaagattctgagaagttggagaacaaatgcattttcacccaaagtacatggtcttggggaattggaggtgatgagctactagggtcaagggttcgccctgggcatgcaagccttcctagtgtagggcttatcgtggggagttgagggagcacgctctcactttgagccttcagctccatcccaggttaaaggttaagggttaaggatgactttcctaggaccatctaggcctctgatgggaagcaggctgggctgggctgagatgactcactctctgagattaagggaagacaccctttcctgcgcaggccttggctgggttcctggaacctcaaagggctgcagacccaggtcctgtcggagaactctctcccagcccttgcccctatcctatagtggccaaactgctaaaaagcttgttgtgcctcttggcctcccacttaccaccatcctttgaggttccttgctaaggtcaccaacatgttcattacatctggtgaacacttgtcttgtcttttgccttcttggtctactctgttggtgtcagctcttcctcattttatcccaggtgttcatgtctctcccttcaacctcccattatcacgcatatgcaaccattccgaaaggtggtgccgacagagactgctcttccaagctgcagacctgtgtagacacccttgcatcccctgggatatcttgcagacatctcatacctcaagacccgaaatgattaccaaacacttagtcgttcaacctagaaagcagagtattggccttgactcctctctccctttcacctcgaggttcaatcacctagacctctccattccacttcctaaagctgtctcaaatctgtcgacccctcccacagggtggctcccacagctgccactcccatcctatttcaggccaccatcattgctcaacttctgcaaagacctcctaaagctggtcttcctgcttccactctcgccccctacagcccattcttcacatggcagccaaaattatctcagaaataaatctgattatttctgtactgaaaatttaccatgtcttaccatggccctacaaggcttggcccccgcattccttctcttatcttctctcaccctgctcttcctaaccacttacaacgatccaaccaagtgatctcttctgttcctcaaacatgcctacctgcggggtcttggcacctgttctctctgcctagaatggctattcctccaactctacacatacctgatttttttttttcattctttaagcctcaactcacatgtcctctcacagagaagcctttcccaaccacctgctctagagaggcctcctccatcttcttgtttatgtatttgtttattatctatctccccaagtagaagacaccttatctgcttgttcattacagtaatctcagcacctgaaactgcctgatatacatttgacaatcaagaaagatttgctgagtgggtgaataggtctggcccacaaggcccttggggatctgctgcccccgttagccctcccccgactctagccacactgaccattcatgtctcgaacataacatgctctctcctagggcctatacacatggtgttctctctgcctagttaattctggtctccacttaaaagaccacttccttccctgaactcctgagaaaaaaggtctccacactatacgtttcttcagcagcctgaatgccttcacactcaggccttatttccttcacatcaggccttgctaggctgtaagctgcgctaggacaaggtttgtgtgtctctcttgcttgttgctgtaaccccagggcctcacccagagtcaggaccagctcaggccttagtgtttatgaactggtgctaactgtggagactgggcacgtgcccaaagaggtcaccaccacagagcagcccaggccaagcacagaatgaatagtacagtctagttgtaaagaagtttggtatgaggatggccatgggtggggatatgaggaaggatttaggtaaacagggagaagccaggaggattttctggccatggcgcaaattccttagggcagaatgtactgggcatatttaggtaagaaacagatcagcatcactggagtgaagaattcctgaaaaggaggcgggagataagagaaaacaaaggttgaggcgatgttgttgaagttcctgaagacctagcttacttctctgtgccagacctgagttcaaccaccttttgggtctccatcagctgatcccacagtaacctcaatatatcccagactgaagtcatcctgtgtcctcccatgtcctcccctgagttccccatcctagtaaaggtgttttcaagacctccctctcctttcctccacacacctcaatcagtaacaaaaacctactgcttttgccaggcccagtggtttatgcctgtaatcccagcatttgggaggctgaggcaggcggatctcctgaggtcagaagttcgagaccagcctggccaacatggtgcaaccctgtctgtactaaaaatacaaaactaaaattagccgagcgtggtggcgtgcgccagtaatcccagctattcaggaggctgaggcatgagaatcacttgaacccgggacgcagaagttgccgtgagctgagattgcacctgagtgacagagcaaaatgctgtctaaaaaaacaaaacaaaacaaaacaaaaaacctactgcttctaaattattctccagaccatactccagcatgatccactaaaaatataagtctggtgaatgattccccttgaggactcctcacagcttacaggctaaagcccacaaacttttcaacacctactttgctttgtcctgtattatccagcctgctcacctcctgctgctctgccacccactcctctgttccagcttgatccatgcttctgaagcttccagttggggatgtccaatgccttcttggcctaccttcacctggttcatctccctctataagaagtttttctttttcttcttttttgttttgttttgagacggagtctcgctcagttgcccaggctggagtgcagtggcgcaatctcagctcactgcaacctccgcctcccgggttcaagcgattctcctgcccaagcctcccgagtagctggattactactattgcctaagcctcccgagtagctcctgggattacaggagcccgccaccacgcccagctaatttttgcatttttgcaggctggtctcgaactcctggcctcccaaagtgctgggattacaggcctgggccaccgcaccctgcccaagaagcctttcttgaccaactctcttacatcatttgatgtctccttttgtctacctctgttttctctctgttgttttcctcacactgttttgcaattattatcctacctatctatccacaagacagtgaacttcttgaagaagcacaactgtcttatatcatcttttatcccagcacctggagcaccgtgagaataacagctaagatttaccaagcacttacacagagctaagagtttcacatgcactgacttgttaatcactacagcaacgcaaggagataggactatcattatgcccactgacaacagaggaaactgaggcacaggaaactcatttgctaggcccaacgatttaaattcaaatcagacgcctgatctgaactactctggaatatcgcctcaataaatgtttgctgtttctcgggagaaatcggtgagaaaaaaataagtatttgctgaaaactaaaaaccaaagatggctccaagtatgtgattacagactatcctcctttttaatcttatctcttgaggggagagggctgtcacacaaccgttccaggacaccacacacagagtaaccgagatgaaagcgccaatccagccatccaccgcggctgggaaaaggcctgtcccttcctaaggtaaagagggactgagagcgtgagcacagggacacgctgcacccaggggaacagcactgggtcgggggaaggatctggccagtgacaaggaggctgtctggaggggtgggggtccagcgtgggttccggaagcaggaaaggcgagcaggtgtgggatctaaattaggacgaggggcggggagggcgctccgcgcagaagggcgcagctcggcctccgacctcagcagcggaccctcatctcggccgcttgttggtccgcaagcctggagtgggctgagacccgcccagaaaccgggagaactgaggcgcgggcgagccccttaggctccacaggctttccgccccgaggtcctaactgcgccccacttcaagtctggcctcttcacagaagtggctgcacgcctcggggtaaaggggggagcggagggtggcgggggagagagcggggagccccgagggaagggcgggggagcctgggccggaaggcgtcccaggctcggctggcagccggcgctctctttcgacgccacccgctgcccccgcccccgagccggccgggacggcaaaacgtctccgcccccagcgcaccgcgcacctcaccttgaacgccgccccacccacccccatcttattggtcctcccgggccgaggcctccctgcgattggtcggggaggtccgcgaaggccccgcccatctctccgcccccgtccccgtccgccggtactttggacggcggcgtggcgcccctcctcccctcccggtccccgccccctggagcaaatgctgccgagctgcggccgcggggcagatgcacgcgctcgggcccttctagcaggcgcgagcagtcgctgggcgcgcgaaagcgaaagaaggaagaggaagggagggggagggcggggtgttggggaggggcgggaggaggaagaggaggaggttggagcgcgctcgcgcttggcctcgcgcccgcgcagagggagggggagaggggcgcgcgcgcgcacgctcgcgttcacgctcgctccatccatccatcctccggtcgcggcacacgcgcgcgcgctccgggctcgcgccgcaccccccgcccgggagaggcgggctggagtggggggcggggggaggggcgcgcggacggcgcgcggactgcgcgcgggcggggtgaggtgaggaggaggaggcggcgacgggacaagaagggaggggaaggggccatggccgcccggtgaggcggccaggcgggggggcggcccgaccccccggccccgggccctgggccccggggagaggcgaggacggaccgacggacatggggctccggagcagccgccgccgtcgccgccgccggaggacgcggccctgagaggctgccgggccccggcgcggccccccgggcggggtgagtacgggacggagacggggacggggacgggggaggggcctgtggggggcggggggcggggcccaaggcggggcttgggccccctccccccaggtctgggtcagcgccccttcccctccccccgggccgacgcggaaacgcccggcttcccccagcttcccggccgggccggggcccctggctctcccccgtctgggtcccccttgggcggggcagggccggccggggagggggcgcggggcctttgttagggagccaggccccagcccccgggacaatagagacaccctcccggactcctctccccggccggccggggctgctggcgggcggggaaggagaggggctgggacgcgtcccactctctgggggtcggtctgtcccggcccggcgccggccccggcggctcggctgtcctccccccagtcggtatgatgcagcagcagtgccgcagggacgggggaagagccgaggcccggcctcctacccttcccagtgcccccggctcattcgtcagtccccaccccactctaggccggcagctcctgaaactcgtacccaccgttccgaggggccctgggttgtgggttctgtgtctgaatccttgggtgggggttcctggactttggggctcttggagagacttccgggctggtcctgagggagggcgggtggttatttaaaggaagaacaggtaaggggagtgcccgctcctggcgtgccaccctaccaggctcttcccccccaccccccgccgttcctgctcatggtggctagaaatgtcccttagctctaggctcctgtgggctctgctcccctcgtggagtggcaggctgatttcaagggaagacagagtggggtgaaggttgtagggtcctagggccatttctacttctggtagcagtacccccccaagtggacatcctggctgaaagcagaggtgactctgaggagagtctttagggaaggcggggggtgtatttaggagtctgtgcagttctttgccacaccctgtgggtttgctttgaggccttggagttccttctcctccccctgctgcattgcaccatgggtatcaaagaggggtttgagttttggggacctagggtgagctgctgcctcctatagacccagactctgattggcagtggagtccagggcctgagctcaggcctgggaaagactaggccccctttaggtttcaggccttgaaggaccatccagacttagggagcctgggccttggggagggagagaccctgatgccaggactgagctttgggcagcgaggtggggagggaaggtggccgcattcagaggtgccttggactcacaacaacacccccacccccgtgtgtgcagccgtgttgccgcccgctgtgctatgagcagtcagagcgccgtctccacaagagtttacaaatgaaaatggaggaaatgtctttgtctggcctggataacagcaaactagaggtgagggctcccccacgtgtgcctccagttctttctcttgatgtctctacgtcgctgtatctggcatccacaccaaagaggaatttgggtagtcagccttgttccttaaagggaatagccagctgaaaaagccaaggatccaggaagaagaaagaacacgaagtcaagatggggaaaatggcaaagaaagcatgatttttggctggggccagttggcagcagatttggttggtgagagtccagggggctgtgactcttgtgaccgtagatgttctcccctggggcccaggccatcgctcaggagatatacgcggacctggtcgaggattcttgtttgggattctgctttgaggtacaccgggctgtcaagtgtggctacttcttcttggacgacacggaccctgatagcatgaaggattttggtgagcttcagggtgaaggagcagcagtccagcccttccctgggactgcctggagtttccttctctggaaactgtgctagatgtagcacctggagctcctgtgagccgggggagggattgaagaggccgtgggaccccaggtgggaacaagaggagagggtcctgcccaccctgatcgccagcctctcctgtccccagagatcgtggaccagccgggcttggacatctttggacaggttttcaaccagtggaagagcaaggagtgtgtttgccccaattgcagtcgcagcattgccgcctcccgctttgctccccatctggagaagtgcctgggaatgggtcggaacagcagccgaatcgccaaccgccggtgagggaaccagagctgcccgttctctgcagcctgtgccatggtgtagtcccccgggggcattgggaaggtacagagggtgggttttacttggccccagatgctccacctgcttctgaagttgggggcagagcggggtgaccaccttgacccctttctcttccttccccttggcccctttctcttccctccccttggcaggattgccaatagcaacaatatgaataagtctgagagtgaccaagaagataatgatgacatcaatgacaacgactggtcctatggctcggagaagaaaggtgcttggggatctggggaaacccggggggcattgggatgaggtgggaagcaggaattgggtatacagtggtcacaaattgttgccttgaatgatgaagagagagtgtagttacgcgatttccttttccttttttttttttttttttttttgagatggattctcgctctgtggcccaggctggggtgcagtggtgagatctcggctcactgcaacctccgtctcccgggttcaagcgattctcctgtgtcagcctcctgagtagctgggattacagtcgcgtgctaccatgcccagctaatttttgtatttttagtagagatggggtttcaccatattggccaggatggtctcgatcttctgacctcgtgatctgcccgcctgggcctcccaaagtgctgggattacaggcatgagccaccgtgcccagcctgttgtatggttttcttgagatgcttttagattgagaacttaacggaaaccctgctctttatgcttttgtttcccacagccaagaagagaaagtcagacaaggtgagagccgggccaggcattggggaaataatgggtaaaggacagataccctcccctttgggcagggagtcctcgagtgtcatgactcaaggctgaggtcattgggggcttgagggtgtctttggtgggtccggggcgggggagtgtgggtggggaaggggggtgggggagggcacatgggtagacaggcctcctactggggaggaagagtaggaatttgaggatgctgctttgtcaaatcttttttccttccctgggttctcggctcccccttttcgttaccctttccccaaagctatggtatctcccattccagaaccccaattcccctcgaagatccaagtcattaaaacacaaaaatggtaagtggagccggagcaatgggaatgcttctagctgtgtcttctgggactcattgccggggggtggaggtggggcccggggataggggaattgagggagggcctgtgatccttctgtcacccccacttcctctctggttattttcagggttctctgtctgtacctctgcatcaaacacccttccccttcttttttcttcttcaggggaacttagcaattcggatccttttaaggtgagtatgggccgcccctcatgcttgctctcattgtcctggttgtgaggtggtggggatttggacaagtagggatcagaatgctgacagccagaggcactgatgagctatttggatcttacatatttatgttctttctgagtcccaccccttatccattggcagatgggatgagagaaatcacttggaaaacggcagggtcgttctaaagcctcacttagaaagggaccagagggactgattctcacttccacccctgtccttctcttttctctgccccatctctaacctgtacctctggttgtcctgcagtataacaattcaactgggatcagctatgagaccctggggccggaggagcttcgcagcctgctaaccacggtgagggaggaccagcaagagagaaggtccctgggagtgggctggagccataggcagtggtcaaggcctgggaggaagctggtgacctagcagtcagggccgtatcgttctctctgtctggaattaggtttcccggcccatagtgtcctgggaccatctgctctggacacctttgggccatctctgcttgtgctatctagcatttatacagaaagaaacatctaacatctagagtaggttccttccatccctcctttcagcttatattcctcttccagcaatgtggggtgatttctgaacacaccaagaagatgtgcacaaggtgagcacagaacctagaaagggggccaggcgcttcctgcacactcaccatgggcatgggttgggagtacccctggacttgagcaatggggctcctgcccttccccttccctcctctaatgatgaggcctttggccacaatctggggatgaatctgcattcaccccttccctgtctgtgcctgtggctcctgccttgccgaggggaggggctttacctgagttcctcagaaccctccctgccttgcctcaccaccaggtccctgcgctgcccacagcacacagatgagcagaggcgaaccgtacggatttattttctcgggccctcggcgtaagtggccctacaggaagggtggggggttgtgaccagttagggcgatgatcactatctctaaagcccttctttggctcatcccctttccagtgtccttccagaggtcgagagctccctggataatgacagctttgacatgactgacagccaggccctgatcagccggcttcagtgggacggctcctctgacctctcaccctctgattcaggctcctccaagacgagtgaaaatcagggatggggtctaggtacgtgatgcagttgggccctaggggctctgtgcccaaagccatgggggtgccacctctcctgccataaccatactctcatcccttgtgtctctttctctacaggtaccaacagctctgagtcacggaaaaccaagaaaaagaaatcccatctgagcctggtagggactgcctccggcctaggttccaacaagaagaagaagccaaagccaccggcacccccgacgcccagcatctatgatgacatcaactgacttgggtgcaagggatagcctttggctgagcagagccctctctcctgacccccacccaggtggcatagcctggcaaatggacggctgctgggggttggggcttgggaagcttggtgggccaggcaggcagaggatccgattatgcgcccctggggggtgtcaaagtcctctgcaatggagcacgactcctcggcgtgcaggactcagacctggacatattatgccttggacataagtttggtggggaggcggttttcctatttattctgtgagttactggatgtccagctaggccaggggcctgacctgggcactgtgccagggcactgcctgccccccaccccaggaactggactaagccctgctgaggggcaatgtggcgacccgggaggctgtgggttggaagctgagcctggagggggcctgcctcggccgccctcagcaatgtgaatgggtccggtgcttggagctgaggggcaaggctgggcatgtcctgtctgtgtgcagaatcttatcaaatgcccccagtcccaggggtaggcaggcacagagtgctgtctgctgaggtgggcgtccagaactgccgccaccttccctgcccctcacaggggcagccctttcccctcagtccccatgggcctccttggcagcaggagctgtccttttgttgggtgccaggaaagggcctccagcctctacagcttcaaggaatgggaaagggagggtaggaagagggagaagtgtcagaattcctccccctgcctctcctccctgacccagggctggtgaggagtggggccccaaggtgagagggaacggtgctgctttatttgaaatgttttcttacctcattccctgccccaggaagggacccagcctcaccctcctggggtggccccgtgttcctcctgcccaccctgccccactgccctaccggggcagcccaggttcccaactgctgcttccacccccttcaccttgactggcttcagttcctctcagcgctcctgcctccaaagcgtgccctgtttcccttccttagcgcttttaagttatttattctgtacttgtggtttggggctctgaggaaaatcctaatcttgtgcctctccccctttgctaggagttgggtgggaagagagggtggcctctgtgccccaggttgtcagtggaggggaaggggtgtcactgcccctctgtgggactgtcatgccagtgtgcccacctgcctggtctacatcctaaagagatgtaccgtcccccctccatgcgggcaccaccactcccaggagccaagctggaggaccgcgacctgggctgggagcagagctgactgacatgggtggaggtgaccctgagccaagttctctggcacttgctggacatgtcccctaccctcttcccaagaggagccatcccacatttgggtagttagtacccaggactggttggactgatcgggttagggaccctagagggttaagggaacaacagagatggggctgcaatgccctgtctggaactccgctctcccgctggggtggttctgattgtggctcatgcctggttgcaaattggtttttaacccacaaattgtgattattttttaaaaagccaaacagattttggcaggagttagaataaatcccggggcctgggcttctctattcttggccctccgtagtctccctccgagaggaggccagagggagaggaggatctcagcaggcctctagccgcttccagatgcagtctggggagtgggctgaaggtgaagggaggaaggctgtgggccactctcccttctgagaggcagctgcagctcaggccctaatacactctttgccctgtggcctctcccttttccccccttctggttggaggagggagaagtgggaagtagcttgggaactggtttgtccacataaacttccccattgttccttggcccgccctcagggcagagccccctgcccaggctgggtaagagatgggcttggtccagcagggaccctgagggaacaaacccttttccttctggggagagagtgccccccctaccatgtagttgaacaggggctaggagctccccactcccctccctctaacagcaggctgtgtgggtttcaattcccatccttcccaccccggctaggtgtcgtccaccctgtatcctgtgtctgagtgtgtgtgggggggttctgtactaatttccatggccggtggcttttccttccatgcatcactcccccccgcatgcccaggggccacccgcctggcattaccgcatgctggggtcattgggggaggggggtggggctcacgctgtcctgtggtcttgagatttttatttttgcatatgtaatccattctgtacaggtagctaactttgtaaacgctgtgtattccctctgcccccatggctgctggtgtaaataaactgcatctcccgttggtagccccggcctacctactctcattaccattttcctgggggcagcgcaaagccattctctgtcacagaaagaggctgcaggaccacaaaatggaactttattcagtcacagacactgaccctccaatagccccagaagcaagagcctagggcccagcaatccatacccagtccttggagttgggcagggtaggacgctggccaagggccagtgctgtctcttgcttacagcctgaggactacgggagcagcagctgtggcctggccgctcccaatgctgggggcttggcttggtgccccatccccttcctgactgagctctatgaaggactcttaaaaaaataaaataaaatgcaagcaaagtgctttgaaagaagggaggacaccctattcctgctaaggggtagaggaagaaggtgaaggcggctaggtgcccataagagaaggctggcacaatcttcattcccgccagtgtgatttcagtctcaaaagatgagtatttggctgagaaatggaaggatactccaggctccctacggagttgtgctggggccatgctgagctgcccttgcaggcagccctgggtgctgggggcagacatgcaggacactgggaagagtcagaaccacaggtgggagggaatctcagagcccaggctccccactgagcttggccagcagctttgaactccttcagaggaccctaaaagtgaaggaagatgacatcctcatttctacctgagttgtgctcgcacgggagggacatctgtactcctgtggatgagaaggggaggccgcatacttgcctcctgtgtcctatggaggagatttccatcacatcctttccacccctccctccccggcccttgggcccagctctggccaggaaaagtggggaggccgtaaaggagaaagaccatgcctttcattttcttcctatgtccttatcgtccatacatcccaaatactaggaagctgaagaagacggtgactcccaccagggagacagtggcaggtgctgtgaagaattggcggtaattgattcggaagtaccagaccacacccaacagcaccacaaagacaggcaccatgaggctgcccacattgacaccaaggctgggtggctcagtggccgagggggccaaggaggctgaggggcctggaacagctgaccctgggggtgagcggtggcagtgaatcacacagttgtcggtaatgttcagagaacgcagtgtgcgggctgggtcttgtagcaggcggccctggtagatcagtttcatctggctttcttgtccagggaagtatttgctgtaaggatgaaagacatggaagaaaagatagagggtgaggaatgagaaggcaaacaggcctggaccaacaaagcaggggagtggggaaaaactggagggtggatttttttttccctcatctttatccttttttttttttttttttttttgagacggagtctcactctgttgccaggctggagtgcagtggcgcgatctcggctcactgcaacctctgcctcccgggttcaagcaattctcctgcctcaccctcccgagtagctgggactacaggagtgcgccaccatgcccagctaatttttgtatttttttttttagtagagacagggtttcaccatgctggccaggatggtcttgatatcttgaccttgtgatctgcccgccttggcctcccaaagtgctgggattacaggcgtgagccaccgcgacaggcccccctcatctttatccttaactaatgaggggtgtatttgtttgttttgtttttttagatggagtctcactctgtcgcccaggctggagtgcagtggcgcaatctcggctcactgcaacctccacctcctgggttcaagcgattctcctgcctcagcctcctgagtagctgggattgcaggcgtgcgccaccacgcccggctgatttttgtatgtttagtagagatggggtttcaccatgttggtcaggctggtctcgaactcctaacctcgtgatgcacccgcctcggcctcccaaagtcccgggagccactgcacccggcctgaagggtgtatttctaagaaagtatctacctgcccttggtaggggctggatcttacactttgctgcagctcccatgtctgcaccagcctccttagaggcaaccaagggctgggggatgagcacaagcagcttcccacttcccaggccactcacctcttcagggcacccacggtatcctctggcctagccacagccagctcctcggtatcattgaggaatttgagccgcacagtgatgaggccagggctgggagggaggcaggtgctatcctcagatctcaggggggcctctggactgctgctgcctgcacctgcttgtcttttgggcaggccttggatgtcaaggagatgctcaaggctgggctcaacaccacccccagctccagcctccccagtggagtctccccgaccttcacccgcctcttcagccttctcatcattaccctctgatggatgggggagttcagttggctcggggttgccttggcctgccaccaggtggtccacatgccccaggtggaggacggatgtgtcgcctgctgacacaatagcgcccaggagctggttgctaccgctgtctgctacgtaggtagagagccaagctaggaccaaggctagaatcagcaccaccacacctgccaccaccatcacctcattacccacaccctcaatgagggtgacatcagagagctccatggcctggctgctggcagggtccacgctgcaggaacaaagggggacagcatcagcagagcctgaggggttgcaaccaggtctctagtttgtttaggttctaactgacccagccctgaaaaaaaaaaaaaaggagttcagtgttgtgtagaagggggcacaaaccttcctaattccggcaccccaacctaaacctaaagacctaccctaccctttgcctctattgtgaaactcttgctttcacgttctgtgaccttcctctctcaaactccaacttcccaatgagtgtggatcagcaggaaaagcccacagccttgctgctgctgctactgttgttgcttttttggtgaatgaggaaaaatctttgctgaggcctgagtttctctaggatttctatcgcttggtcaagcaaatatgcctcctaagcagcctccaaagtggcttcagagagacccaaaagcctggaatattttactgtggggcccccctggaagcactgtttagccatccctgccagattgtctcatttgagcctatttcattcctggtcacagatccaggctgccagatgtcaagagccaaagaaaactgacctaccatcaaaagcagagtcagacaaatctaaaacgataactctgtagggaccgcgggcagatactatgcagcagacattatgtgccgcctctgaaacttctggcaagccctggggagcaacttgggacagacaccagaagcaccaccttcctgggtcaccatgggcccactcctgcaatgaccactccccaagtggagtgatttgaaaaagattccataacagctctcacaatccatatctcagtctctcttctttcactgtgaaggttctgctgctgcagtttcttagaaaggcaggaagggtccctgcttgctccttggagtacctactatttcccttggagaatctgctgctttcacagctgtccctgggcaaatccagtctggtgattaccattatcagactattctcacagcacctataaaacttcattatacttatgtacctgtccatctttctattagactcctggtagacaaggatcgtatgtatttctcttggtactgaagtgtccaatataatgccccagtagttgctcaaagaattatctgtggaacacatcaacatccttatttaatataccggccctggagttagaaaaacaactaattataaccccagtcttgcgtcttactagctataacacctcagacaactttctcagagcctcagctttctcatcagtaaaatggggttaaaaacagtacctacctcatgaggttgttttgaagatgacgtgaaatcatcgaagcaaaatacttggcacagtgcctggcacactgcaaattgcaattgcttaataacggtagtaattatttatcacaaccacaactaacccctgatggtaagaaggttaatgttattaaccatgatttacaggaaaagaaactgcggcaaagaaagacgaaaacgattggcacagacacagggaactctcgtggggaggggcccggcaggaccccaggtgtccggcctcaggggtctttgctctgtccctcagcctgtgatctaccctgtccgtaccgtgaccgcacggtgaggaggggtcccgcaccctttttctgaggcgaaggttccgcttttggatggtcctattccctcggcgttggactggggtccatgggcccacccgaaccgaagggctgcctggccccagcctccgtgataagaccagttgtcccggccagtgaggagtagggtcggctaagggggtcacaaaccgtccacacccctcaaacttcggggcggggctggggaactgggggcggggcttcaggacgcgaggagtcatgggaaattaaagggggattggaccggcactgtgcctggatggggaagtcctcacctgaaaagaccagactaaatgttttgacctcgccaggacggcccctggactcgtctttccgtaggggtcgggaaaagggctggcaatctgcgattctgttcagggtccggtctcttccggcttctcccggaagctgttataccagggacaggaagtcccgcctccgcgccttgcactgatgacgcgaagctgcgtaagacgggctgacgtaaaaggtattctttaaataaaagggacaggtttctcagcggaaggaggggtggagtcattgttggcgggattgcggccctcccagagcggggccacgcctggtgggcggggccttaggcaatccagggtgagaggcggggccaggggggaggagttagcgcggaggtacttgggaaaggggcgtggcttcgcgactgcggaaggttgcccgggctggcgccgctgggcagagccggtgcgacgtttccctttccagctttgttcttccggccctgctgtctgcctccccggctgattggattcgttactgctttgcaacgcgcacctaactccaggttagcggggattagtaagaactcagctctgggccagtcgggaagacagataaggagaccagttagtcagcatccagtgcttgaagagtgcggccccaggtagtgtgggacccggagaaagaaggcgggaaagcatttcaaagaaggcacagattcggcgcaggcttaggacacaaaaagggggaaaagtccagctttcaagaacttatccagatttttgcagttaaaattttttcttttttgagacgggagttccgctcttgttgcccaggctggagtgcaatggcgcgatctcggctcactgcaacctccgcccccccgggttcaagcgattcttttgcctcagcctgccgagtagctgggattacaggcatgcgccaccacgccccgctaattttgtattttagtagagacagggtttctccatgttggtcaggctggtctcgaactcccgacctcaggtgatccgcccccgtctcggcctcccaaagtgctggcattacaggcgtgagctaccgcgctcggccgcaattaaaattttttctaaaaacttactgtggccggggggagtggcttactcttgtaatcccaccgctttgggaggcagaggtgggaggatcgcttgagctcaggagttcgaggctgcagtgagctatgatctgagccactgcattgcacccgacagggaggccttgtctccaaaaaaaaaaaaaaaagcgctggagtttggggttttggagaactactgattaaaggataaataatccagacaggggcaaacataagcaaaaagctcggtggcttctaccaactgaacactggcagaagtagcacttagatcaagaaatagataattaggactggcgcggtggctcacgcctgtaatcccaacacgttaggaggctaaggcaggcggatcacaaggtcaggagttcaagaccagcctgggtaacatggtgaaatcccgtctctactaaaaatacaaaaattagccgggcgtggtggcgcacgcctgtaatcctggctactcagaaggctgaggcaggagaatggcttgaacctgggaggcggaggttgcagtgagctgagatggagccactgcacgccagctggggtgacagagcgagactctgtctcaggaaaaaaaaaaaaaagaaagaattaccccagaatctcccccttcatgtcttcttctagccattaacctccaaagagtaatcactattctgacgtctgtcaccatacattagtttttcctgtttttgtacttgctataaatggaatccaactgtgtatcctcttcggtgtctagcttcttttttgtaagtcctttcattgtggtaaaataaacatagctaggcacagtggcatgcacctgtagtcccagctactctgaaggctgactcagcagtgtcacttgagcccaggagttaaaggccagcctgggcaacacagggagacctctatctctaaagataaatatatacatatacgtaacataaaacttaaaaccattttaactatttttaagtttgcaattcagtggcattaagtacattcacaaagccgggcacagtggctcatacttgtaatcccagcactttgggaggctgaggcaggaggatcccttgagccaggagttcaagaccagcctgggcaatatggtgagacccccatctctaaaaaaaaattaattagctgggcatggtggcgtgtgcctgtggtcccagctactcaggaggctgaagtgggatgattgaccctaggaggttaaggctgcagtgagccatgagccagctactcaggaggctgaggtgggatgattgcttgaccctagggtcaagattgcagagagctgtgatcgcgccactatgctccaacctgggagacagagtgagactccgtctcaaaataaaaaaaaatgtaaaggaaaataattgtcttcagctgagcatggtggctctagagtgtaattgcagcacttggggaggctaaggtgggaggatcacttgagtccaggagtttgaaaccagcatgggcaacattgcgagaccctgtcgctacaaaaaatttaaaaattagccaggcctggcggtgtgtgcctgtagtcccagctacttgggaggctgaggtgggagaatcattggagcctaggaggtcaaggctacagtgagctgtgattgcgtcactgcactccagcctggcatacagaaagaccccgtttcaatcaatcaataaaaaccactctgggagatcttcccaaggcagtacacatgctggtcacttggaatccctccctagttctttcctgccatgggtaatatggatttgtctaaccactccaacatgagttgttgcaagcaacgctgagaggaatattcctgtatgtagcctgccttttgtgtaactgggaacagtgtttaaggaagtggccaaattgcccccaaagaggcgatttgtccaccaacaggatttgcacacctggccttgtatcctgatttttttttttttttttttggagacgagttttgctgtcacccaggctggagtgcagtgggagatctcagctcactgcaacttccgcctcccaggttcaagtgattctcctgcctcaacctactgaatagctgggagtatatgtgtgtgccaccacacctggctaatttttgtatttttagtagggaagggtttcaccatgttggccaggctggtctcgaactcctggcctcaggtgatctgcctgcctcggcctccgaaagtgctgggattataggcgtgagctatcgcgcctggcctactttttgtatttttagtagagaaagggtttcacaatgtcagccaggctggtcttgaactcctgacctcaggcgatccacccgcctcggcctccccaagtgctgggattacaggcgtaagccactgcacccaggtatttttcttttttaacggtatcttttgtagttgtaaatatatcagaaaaggctgagctggctgtggtcggcgtgctgtaaaggggtagaaagttcagcattgcccctgagagtgaggctcccagcctccctctctagggaggagttctttttcttctgtcaggccttttggctctgtaaaactaaagcacaaattttcatccagaaagggggtgttgcattctgcataacaaggtgaaaaaactgtctttgtgttgatgaaatggaatcccaaagatataactctcctggaggagggaaagttgggcagctgcagcaggaggcagaccccaggactttggatccctgtctccactgtataactccaactggtattgggactggagaccctaggatccctcagcaaaaagactgctgactcaggagaagactgctgggagctcctccccagttccctcctgtgataggtactataggttctgggtctatgagaggctttgtgtttctgttatttttattcatttttttatttttttttgagacggggtctcactctgtcgcccaggctggagtgcagtggcacaatctcagcttgctgtgacctcagctctctgcgacctctgcttgctggactcaagcgatcctcccaccacctcagcctcctgagtagctggaaccatcatatgcaccagcacgcctggctaagtattttgtgttttctttttttttaatttctagagacaggatcttgttatgttgcccaggctggtctcaaactctaggactcaagtgatctgccccccttggcctcccaaagtgctgggattacaggcatgagccaccgtgcctggcctttttttttccccagcctcagcaacatagtgagacccgttgtggtgcatgcctgtagtaccacctacttgggaggagtattgcttgagtgtggaaggttgaggctgctatgagcagtgatcgcgccaccacactccaacctaggcaacacagagagcccctgtctcaaaaaaaaattgttttagggacagtgtctcactcttgcccagactggtctcaaactcctggggtccagtgatcctcctgcctcagcctcccttgtaggtgggactacacggcacctggcccttgtgttgttcttgtaacagttgctcaatgcagaaaacttggaaaccacagaacagcaccagggggtggggaatgaacatggaatgatggggacctctgtcccatttaagtcaaacaacatccatactttggttccatggactaatcatttatttgcactcataaaaactggcttgctttgaaaagcttcctccaaaagctgtattgtggtacttttgactctgggacaagaggaagaagttggggaattcgggcagttggtggctgggccctcagagactgtatgtggtgaccactgtttaagacaccattcatcacttggggacggagggagcacatagatggaccccaggctcatggatgttcctccttccgcagtcatttactaaaatacctgttcaaggaatatagttccagtctcagcctagttgagacaaccacaggcacttaaataagtaccaaggaagcctctgcagagatagtgctattggaactgagtcctgagggccagatcagccttgaccaggccaaaaaatgtggaagagtattccaagcggtaggaataacacatgcaaacacctgaaagcaaagaggagcaggtcacatccagcaactggtgacttgtttactaaggctggagatgaaccttggaaggaagaagggaagtcaagaggccagataatttggcagaggctagaggctctgttctactgagttgttttctcgtttgttttgttttgttttttgagacagagttttgctcttgtcacccaggctggaatgcaatagcgtggtcttggctcactgcaacctccgcctcccgggttcaagcaattctcctgcctcagcctcctaagtagctgggactacaggtatgcgccaccacgcttgcttggcttttttttttttttttttttttttaaccctgagtggacacagcacatgtttcagagagcacagggttgggggtaaggtcacagatcaacaggatcccaaggcagaggaatttttcttagtgcagaacaaaatgaaaagtctcccatgtctacttctttctacacagacacggcaaccatccgatttctcaatcttttccccacctttcccgcctttctattccacaaagccgccattgtcatcctggcccgttctcaatgagctgttgggcacacctcccagacggggtggtggccgggcagaggggctcctcacttcccagtaggggcggccgggcagaggcgcccctcacctcccggacggggcggctggccaggcaggggggccgacccccccccacctccctcccggacagggcggctggccgggcggggggctgaccccccacctccctcccggacagggcggctggccgggcggggggctgacccccccacctccctcccggacagggcggctggccgggcggggggctgaccccccacctccctcccggacagggcggctggccgggcagaggggctcctcacttcccagtaggggcggctgggcagaggcgcccctcacctcccagacggggcggctggccgggcggagggctgaccccccacacctccctcccggacggggcggctggccaggcggggggctgacccccctacctccctcccggacggggcggctggccgggtgggggggctgacccccccatctccctcgcggacggggtggctggccgggctgaggggctcctcacttcccagtaggggcggccgggcagaggcgcccctcacctcccggacggggcggctggccgggcggggggctgacccccccacctccctcccggacggcacggctggccaggcggggggctgacccccccacctccctcccggatggcacggctggccgggcgggggggctgaccccccacctccctcccggatggggcggctggccgggcggggggctgaccccccccccacctccctcccggatggggtggctgcccggcggagacgctcctcacttcccagatggggtggctgccgggcggagaggctcctcacttctcagacggggtggttgccaggcagagggtctcctcacttctcagacggggcggccgtgcagagacgctcctcacctcccagacggggtctcggccgggcagaggcgctcctcacatcccagatggggcggcggggcagaggcgctccccacatctcagacgatgggcggccgggcagagacgctcctcacttcctagatgtgatggcggctgggaagaggcgctcctcacttcctagatgggatggcggccgggcggagacgctcctcactttccagactgggcagccaggcagaggggctcctcacatcccagacgatgggcggccaggcagagacgctcctcacttcccagacggggtggcagccgggcagaggctgcaatctcggcactttgggaggccaaggcaggcggctgctccttgccctcgggccccgcggggcccgtccgctcctccagccgctgcctcccgggcggcgctcgccggcgcggcggcaaagactgagacagctccgctgcccgctgaactccatcctcccggcggtcgggcggcggcggctgcggtcggtcgcggcagcggctccgcttcatatctgcagctggggcccgcgggcgtcagcgccgcgactgtcccagtccgcactgccccgggccgcagcgcagccgcgccaaccaccacccgcggccaccatggccagacgggctccctaagccaccgaccccagcccgcggtgccttcgagccttctggggcctccggcgccgcgacctcctctgcgctcctcacggaagacttttttttttttttttttttaagacggagtcccgctctgttgcccaggctggagtacagcggtgcgcgatcttggctcattgcaacctccacctcccaggttcaagtgattctcctgcttcaacctcctgagtagctgagattacaggcatccgccactatgcccggctaatttttgtatttttagtagagacagggtttcaccatgttggccaggctggtctagaactcctgacctcgtgatccgcccacctcggcctcccaaagtgctgggattacaggcatgaaccactgcgcctggcctaattttttgtatttttagtagagacagggttttaccatgttggtcaggttggtctcaaactcctgacctcaggtgatcctcccgcctcagtctcccaaagtgctgggattacaggtgtaagccactgcactcagcttgttttaaagagttttgattttagtgtgagaggagccactggagggcatgatcagagtttgactcccaaagaccattccagcaccaattcagggcatgggtctcaagatctcccttggagtgacaaaggcagggcaggcaagccagtgcacgcagagacagagtttgtccctctttaggaggctgaacaggtataagggtggcaggagagggaggtggtgggccactagaatcactggttcttggcatgggacctggatggatagaggggccatccacttaaacacaggaggagaagggaggtgaaggccgagtctgggaacaggccgagtctgcagcccttcctgctggagagagggtctgaagctcaggtccggctagaggtcagcaggtgtctcaagaagcccatggaggagtgaggtggaccaggacagcacgtggagtacagaaaagaggggcaggcaaccaggcgcagtggctcatgcctgtaatcccaacactttgggaggccaaggcgggtggatcacctgaggtcagtgtgagaccagcctggccaacatggtgagaccctgtctctactaaaaatacaaaatcagccaggtgtggtgactcatgcctgtagtcccagctactcggaagtttggggcacaagaatcgcttgaacctaggtggtagaagttgcagtgagccgagatagcgccactgcactccagcctgggcaacagagtgagactaggtctcaaaaagaaaagaaaagagggccaggaactggtcctccgcagttggaggcggggacaggtgggaggggcagaacacaccatgggacagcctgacatggggttcactggatgcacccctccacacgcagcagcaggtagtccctgaggagcgggggcagtggcagccgggtggcaccctgccggcagcggcttcccaaccgagcgcgcacagctagtcgggccaggtgctgcagctgccttggctggttcaccatgcacagggccgagctgtagaaggcttcgtgctcctaggccaggagtgaaagaaggtcagatgacccttgccctaccatctgggggcaacccagcggtgggggtcctgggattttgcagcatgcacccacctgggtgtttcatgtgtctcaaaggactcagattcagaaccatagaggccctgcagtgataatgcgggctggggctccacttcagggaagggtctccactatgtctataccactcccaccccagagagcctagcacagtgcccaccaagttaagagatgccagataaatgtctgtgctgatgcaagtgagggaggcaggagaggtgtgtggagttaggggtcagcctggggtaccgggggagggggtaccctgaaacccaggggtgccactctacccatcctctctacccaggggccctcctgctgctccctccatgaggctggtcctgaaggaataggcctgtggctcgtccctcctccccatctcggccctgaggcaaacataccttccacagctctgggagcaccgcctccacccaggtctcacaggatgggacacaaggataggcattaagcaggacttccagggcccgagggaagttggcgcagtgtttcagcatctaggggtcaaaagagggtcttgggcacatgcctcccccacccgagggcagacccaagtcttgcctcacccacatggccaatcctagcctaatctggggggctaaggtctgagtctctcttcccttttttgtgcctctgtctaccccaccctcaagtatgctccaaccttttggccccagttttcctctggggctcttccctcccttggactctctctcccagaatcctctctccccctcccaagctggggacagccccctggccactgagggcaggctttcagtctcttggaccctctgtcttccccagaagcggagcagttccagccgcgggctcccccacacaggagcctcctatgtcagggcctcccagcgcacctcagggcgcactggctgcgccccgtagtccagcagtgcggcgaaaaggacttcaggctcccagttgggggagtcctggacggcctgcagcgcacagtccatgggcgtgtggcccgccccattggggacctcagcgcgggccccgtaacgcagcagcagctcggccaggcccccgcagccgttggcacaagcgttgtgcagcggcgtgtggcgcttgcgcccggccgcccgggcatcagctccagcctccaggagccggcgcgccgcagcctggtgtcgcctgcagctacctgggccctcggccccagcgcacgccgtgttcagcgcagtctcgccctggctggtgcgcaggcccacgtcggcgccatgctccaggtacagagccacatgttgctccaggccgcgcgccgccgccacgtgcaggggcgtctcctggctctcgcctgctgccaggttcaccgtcgctcctgcttccagcagcaacttggcgcacctggggacaagagagcaaggtcctgaggaaaatcctgaaggcttgggaccccttcagcttgctgtgacactcccttgcctttccacccctctcagcttgaggtcctacctggtgtcctccatgagaatcatacaagccccgctacagacaacagaattggaaggtcctgagagctaccagaagcatcttcagttttcatatgaaaaacttaagcccaggagtgatttgtgcagccaaggacacacagcaagttagtggctgcaccagaaatagtactcactgcctcagacagtccctcccacagtctactctgtctccaccccaaggtctggttctgaatcattcagttgtcagttgtctccttttttttttttttttttggagacagggtctctctctgtggcccaggctgaagtgcagtggtgtgattacagctcatgtagcctggacctcccaagctcaagcaatcctcctgcctctgcctcccaagtagctgggaccacaggtgggcagcaccacacctggctaattttttaaatttttttttatagagacagggtcttaccatttgccccagctggtctcaaacccctgggctcaagcaagcctcctgccttggcctcccaaagtgctgggattacaggtgtgagccaccacacccggccttatctcctaacattttgatagcacaaaattttgaaaacccacttctgtgtacgttatgaagcatagaaaattaaacagtatgcaccaaaaaaaaataaatacaagttataatattttctttctgtccccacacttaaaagaccactcttctaaaccaggccacaatcattcaagcaaaggcaggcacttggggccatcctcctccactttcccctagggaaaacaaacaaaaccaaaggaaaaacaaaaacaaaaacaggttttaaagagtgcatgtttcccagttccagggaaaattataggccagaacactgttgtggcaaacatgcatccttacatactgcagggtaaaccaaacatgcaacaaactaaattaataatgatgaaaccaaactaacagtaacttataattaaaaagccagaacggcagctgctggaaacaggagcagatccaccatcctcgatgaaactctgataatcaaataccctttcccaaaatggccaaaatccttgctcacatattccaggtaggttctttgctctgtagccaagatgtgagtagcagccagtcttccataagctactgaattatctccttggtaaattctaattgtggggctaatttttgtttccaaatactaatttttttttttttttttttttttttttttagatggagtctcattctgttgcccaggctggagtgcagtggtgcgatctctgctcactgcaagttccgcctcccgggttcctgccattctcctgcctcagcctcccaagtagctgggactacaggcacccatcaccatgcccggctaatttttttgtatttttttagtagagatggggtttcaccgtgttagccaggatggtctcgatctcctgacctcgtgatccacccacctcggcctcccaaagtgctgggattacaggtgtgagccaccatgcccaatcttttttttttttttttgaggcagagtcttgctctgtcgcccaggctggagtgcagtagctccatcttggctcactgcagtctctgcctcctgggttgaagcaattcttctgcctcagcctcctgagtagctgggactgcaggcatgcgctgccatgcctggctaatttttgtatttttagtagagacagggtttcaccatgttggccaggatggtcttgatctcctgacctcgtgatctgcctgcctcagcctcccaaagtgctgggattacaggtgttagtcaccacgcccggcttccaaatactaaatttaactaacactccaaagctcgctcagtagggttccagtaagtggggattctcatcttacttagaaagatgaagtctgttggaaggcacaccacatgcctgtaagaacccaagaaagggctggcaaatgtggaccacttcttggacttcatctagatctagtggggagaggtccccagcttgtgggcagtggagagtcttccagaagcccttgaatccttacctgccaccctgtctgttgacctgattgtgaaagtgcaaataccctcatgcagggactccaagaaactgccaaccttaaaaaaagtgggagggttggtgtattggttcatgcctataatcccaacactttgggaggctggggcaggaggattgcctgagctcaggagtcggagaccagcctgggccacatagagagtctatgtctctactaaaaataatactttttaaaaaatagccagttgggccgggcgcggtggctcacgcctgtaatcccagcactttgggaggccgaggcgggtggatcacgaggtcaggagatcaagaccatcctggctaacacagtgaaaccccatctctactaaaaatacagaaaaaaaaaattagccgggcgtgttggcgggagcctgtagtcccagttactcgggaggctcaggcaggagaatggcgggaacccgggaggcggagcttgcagtgagccgagatcgggccactacactccagcctgggagacagagcaagactccgtctcaaaaaaaaaaaaaaaaaaaatagccaggtgtggtagcactggcctgtgattccggctaccctggaagctgaggcaggaggatcacttgagcccaggagatcgaggctgcaagtgagtcatgattgtgccactgcactccagcctgggcaacagagtgagaccctgtctccaaaaaaaaaatctagccctgtgtttcctaacatcggtgtgaggcacccccatacctctcttcccacttttttttaagacagggtcccgccctgttgtccaggttggagtacagtggcagcatgatcatagctcactgaagcctagacctcttgggctcaaatgcttttcctgagtagctgggactacaatgcacaccaccatgcccggctaattttattttttgtagagacagggtctcactatgtttcccagtctggtcttgaacttctgagctcaaaagatcatcctgcctcagcctcccgagtagctaggactagaggctcatgccaccatacccggctagtttttatttttagtagagacaaaaacctcacttacgttgcccaaactattctcaaactcctggactcaagcaatcctcctgcctccgcctccaaaagtgttgggattacaggtgtgagccactgaatctggcccataggtctttttttttttgagatggagtctcaactgttgcaggggctagtgtgtagtggcacaatctcggttcactgcaacctctgcatcccgggttcaagcgattctcctgcctcagcctcccgagtagctaggattacaggcgccagccaccatgcccagcctggctaattttttgtatttttaatagagacggggtttcactatgttggccaggctggtcttgaactcctgaactcgtgatccacccgcctcagcctcccaaagtgctgggattacaggcgtgagccatggcgcccggcttttttttttttttttttttttttaagacagtctcgctggagtgcagtggcagaatctcggctcactgcaacctctgcctcccgggttcaagcgattcttgtgcctcgacctactagtagctggaattacaggtgtgagccaccacacctggccagatctttcttaatacctcaaaacaactaggaatttgggctgggcatggtggctcacgcctgtaatcccagcactttgggaggccaaggtgggtggatcacttgaggacaggagttcaagaccagcctggccaacatggcaaaaccccatctccactagaaatgcaaaacctagccaggtgtggtggcacacacctgtaattccagctacttgggaggctgaggcatttgaacccaggaggcagaggttgcagtgagctgagaccacgccactgcactacagcctgggcaacagagcaagacttcgtctcaaaaaacaaaaaaaaacagctaggtttggctacaaaggattcacagggtattggagactgcagttggaacagagttttcccaaaaagcaacagggcttctgcctcctgggcttagcagatgtgaccttggacaagttactaagcctttctgagcttcatttttctcatctgtaggatgaggtgtctccaggttattgtgaagatgtgtatatgcggtgctttatgaaccacaaagctgcatgtggttgtcaggttccctcttctggccttgtgagctggagacacacacacacatttctccccaaactgtctcagcccccaggcacctactgcaaggactcggggatcgtgcagaggtgcaaaggagtcgtgccctcctcagtcagcacattagccttggctccgaaggtcagcagcagccgcacacagtcaaactgggctcgggcacaggcctcatgcaaggcagcgcgacccccgacacgggcatccagctcagctccctgccggatcaggtgtcgagcacagtctgtgtagcctcgggctgtagcgatggcgaggggtgccgtctgcttggtcttgggggtcagcacccagaaccctagggagagcaaatagttttgggaggtggtgtataagacagggcagggcagggagtggggatgctggttccagctgacagctgacactggccttccctctgcatggtttgctgagcacaaacactgccaggctgtacctgtggaagggggcttattcaagtcctgaagtggaagaataaattggaacagccttttaatacagcttatcaatctgtaacaaaacatagtatgtgtcataaaaaaattaattgctgtataaaaccacaggggccaactaagtagagtgactcccattaaggaaatctcagcgtctttgaatggctaatagtgtcaaaggcttgttcaccttggggcctggggtggtggctcacacctgtaatcctagcactttgggaggccaaggcgggatgatcacttgacctcaggagttcgagatgagcctgggcaacatagtgagaccttgtctcttttttttttttttttaggcagggtctcgctctgtcccccaggctggaatgcagtggcgctatcttggctcactgcaagctccgcctcccgggtttaagtgattcttctgcctcagctgctgagtagctgggattacaggtgcgcaccaccatgcccggctaatttttctatttttagtagagatggggttttaccatgttggtcaggctggtctcaaacttctgacttcgtgatccgcctgccttggcctcccaaagtgctgggattacaggcgtgagccactgtgcccggtcaacttttaattcttaaaagacatacagactgctaaccctgcctcatctctgtttaggagggagctaggataggtggtggaaagggctgctatagtctgtggtctgcagggaaggaggggcctagactctcccccttccccacccactccccttctttctccctcctcttctgccctcttctggtgccccctaccctgttcagccgaccaggccagctggttgctcacagtctccacaatcatgttggcggcctcttcatcttggaacagggcttggacctgctgcaggttgccggagaagagggcttggtggacagctgggtctcggcaggaacggtgaggcctagtgagtcgggcccggggacttgacgggcacctgcggctccggcactgctgggcagccgcccgccgccggtcctcccattccagccactcctgctgcaggcggagagagcgcagcatggaggaggtgaaggggaaggtctctcttgccatggatggggcccaggggtttgggcagtggcacctgggcagagccaggttccctcgacccgactacctcccttgctctgaggagccaccctgcccccgccaccgtgagccagagaaagcagcagctgaggctataaataggtcctttgctgctctggtaaacatggtttgctcagagtcatgatcctggtgctgagaagctgctggcccaacccccagcccagggtgagggccagcccctgcccctgccgataccctttggttggtcagcaggccctcagctgaggccacccccgaaccccagcatctgcatccaccttcatctctagagcgagcatcttgggttggcaaggtccagggtgcgcaaaaaggtcagtcatggagatgggcagggctgggaggaagacaaggtgcctccagcctctctgatgttggctggagggcaggagccaccattggcccacgtggaggagagagggctgacctcagcacaggaggtaaggggaggtcaaggcagagttactgagaaggtgagcagctcttcccagcatctgcagtaacagcaataactctgtacatatgcacagagtttcacggtgtttaaatcacattcatatccaccttcacccaggggatcatacttcccagcccacccaataattagtaaacttggtttggacaataaatgaaattatcacagttgaatgcccctgagatgggtggtcttatctctgttttacagatgaggaatttaaggcttaacaaagtaatctactggctcaaggtcacagtttgtgagaggcagagccaggaccccacatagatggtgtgctttgggccaagaatggtggctcatgcctgtaatcctagcactttgggaggccaagacaggaggattgcttgagcctaggagtttgagacaatcctgggcaacacagtgagacctatatcttttttttttttttttttttttttgagacagagtctcaccctgtctcccatgctggagtgcaatggcacgatcttggctcactgcaacctccgcctcccgggctcaaacgattctcttgcctcagcctcctgagtagctgggattataggcacccgccaccatgcccagctaaattttgtatttttagtagagatttaatttagggtttcaccatgttggccaggctggtctcgaactcctgacctcgtggtctgcccgcctcggcctcccaaagtgctaggattataggcgtgagccaccaccccctgcctctccatctcttaaaaaaagaagaaaaaaaaaaaaagatggtacactttttgccttcagctgctgcagccacctggcagcctcccccattctccaagcaggacagactagtctgtagaaactgccttcaatcatcctttttttttttttctcatggtgtcacccagtctggagtgcagtggggtgatctcggctcactgaaacctccgtttcctggggttcaagtgattctcctgccttagctgcctgagtagctgggattataggtgcatgccaccatgcccagctgatttttgtatttttatttattattattttttttttgagatggagtctcgctctgtcacccaggctggagtgcagtggcgcgacctcggctcactgcaagctccgcctcccgggttcacgccattctcctgcctcagcctcccgagtagctgggaccacaggcgcctgccaccacacctggctaattttttgtatttttagtagagacaaggtttcgccgtattagccaagaataggatggtttcgatctcctgacctcgtgatccgcccgcctcggcctcccaaagtgctgggatcacaggcgtgagccaccgcgcccggccgatttttgtatttttagtagtcggtttcgccatgttggccaggctggtctgaaactcctgacttcaggcgatctgcccgcctcggccccccaaagtgttggtattacaggcgtgagccacagctcccagcaccttcaatcatccttgatttatttttttaacccagctgctaagggggctcacatggccggcctgaggagagccaaggggttgagctggaaactctgggaatggacctaagatgtttaagccacagacctgttcactcttaggagaaagcagctgtgcttccaggagcctctagggggaggaatgaagccgtgaaaccacacaagctggtgtgcctgccaagctggggaaggggagggctcaaaagctctgctcaccctgagctcactcagtgcacagcggcctgcaggcagggctggtctgtcccctctgcatctggggctcctcctggcccttctcccgctgcctgtcctgcctcctggccctgcagcagcaccttgcccagtgatcttttatttcttcctctccctaggcccttcccataagcaagttctagctcctgttcttacattttcagggactgtctcaagttcagcccctcgatgtaatgccttaaacctggatcaactcagtctttcacctggtgtttcttcctctggccatatcccttctgctccgctgccggaatgatctgtctaaaatggttaattcccttgcttaaaaacttctgctgccttccaatacctgtcctttcatttttttaaaatagggctccaaatcctggcctcaagcagtcctcccaagtcagcctcctgaattgctgggattacaggtgtgagccactgcacctggcctgcccttttcaactaagcccccaattccttggtttggccccatgccactcacgtagggtaggcatcctcatcacgcacggctccccacaaccgttccctgtcaggccattcccttagctcagaattccctcaacaccttcctgaggatctacccctaaggtcacctgctctgagaggtctcttcagcaacccattgcctgactcttatagttccagccactgcccaatctgcactcctgaaggactcaggggcacgctgtaaagcacctatctatgctgttgatgtgggtctgccatgctggatgtgggctccagagcaggccctggcagtcagagcacttggctcatggcaggcgggcctcttatgtgtagtgcattgaacgaaggtccctgttctctgccagagcaaacatccatccacccgcccgcccaagtgggtggcagcagcctgggctttttccggcattgcccctactctactgttcacctactctctgcctggctccagcctcttggtggcagtccagggtgggggatcccagaggaggaattagatcatacaaagcaaagcctggaggtcctcagagaaagatgcctctataaatgcagccttgatgaaccctgttggcacccatttggtgtgttaattgccacatcaacggcctggctgggcacccacagctgggttcccagggttgagaatctggcaaggctgggtgagaccaagagaggccaaggcaggtgggtgtccccttcctccctgaggcacacaagagtcatagcctagcccctcccctgccttcttgccacacagacctgaaggagctaggtaccctaacagcttagtcccaagataccactgtattcagtccccttgtctgtagagttagcttcctgagggcagagaaaggaggccttgacttcaacctggagggaacagggccaggtgatcagatgcccagcctgccttctgggatctcagagcctgtggggtagtgaagcacacaagaagccaggatgtgagcgtgggattgatcaggactgagcagggggaccggggctcatgggtgtcaagaatggggaataggcccagggcagaggggagcttttatttttttagagacgaaatctccctatgttgcccaggctggtctcaatcttctaggctcaagtgattctctcacctcagcctcccaagtggctgggactacaggtgcatgctgccactcccagctgtgggggtttaggtgcaggaagatcccagtgtagatggggagttagcagggagtggaaggtgggagagaaggaaatgtatggtaggttcaggtagaaaaacccaatgggaatgtgaagggaccagggtgcaggggaattagccccttcttgccctggccttgtggcacaaaagcctctagaacagggccctgctgtaatcagcaggtaagtgaacatggagttctcaaagcacttactcacttcagccttaagactgggatccagtggggcactgtggctcacacctgtaatcccagcactttgggaggctgaggtgggaaggatcacttgagcccgggagttcaagaccagtctggagaacacagcaagactccatctctacagaaaaatgttgttaattagctaggcgtggtggcacgcaccagtagtctgttacttgggaggctgagatgggaggactgcttaagcctaggagatcgaggctgcagtgagccatgatcacaccactgcactgcactccagtttggtgacagagtgagaccatgtctctaaaacgacgacaacaacaacaacaaaactggaatccatgggatcagcctctttgggaaaaggagattaacgcttccccccagaggagtgccaagcccatgcccatggaaggcctctgtctcctagctgcttagtgcaggctgaggctaaggcaggaggggctggctgtcaaacagggctatttattattttatttacttattcaagagatagcatctcaccaccttgctcaggctgggcttgaactcctgggcccaagggatcctcccacctcggcctcccaaagtgctgggattacaggcatgagcctccacacctggcccaaaccgggctctttaacctgcctcctcttgcccatgagttgggagagttttcccaactcctccttccagaaaggaaaacaaggttggcaacttggtataattagaccttttacaccccacccatgcctcttgtccacctctagtccgaaaattggtacagagaagtcacagcaatgaagagttgcttggcaacaaaattttattttattttactttttgagatggagtctcgctctgtcacccaggctggaggcagtggcgcgatctcggctcactgcaagctccgcctccggggttcacaccattctcctgcctcagcctcccaagtagctgggactacaggcgcccgccaccatgcctggctaattttttgtatttttaatagagacaaggtttcactgtgttagccaggatggtcttgatctcctgacctcgtgatccgcctgcctcggcctcccaaagtgctgggactacaggtgtgagccaccacgcctggccacacttggcaacaaaattaagtagtttgagatcatatcccaaagtataaaataaatacctgtaagtccatgctgatataaatggatgaatgaataaataagggagaataggcaaatctcccatgcagaagaattccaaataaactgccgggtgcggtggctcacgcctgtaatcccagcactttgagaggtcgaggcgggcggatcacaaggtcaggagtccgagaccatcctggctaacaaggtgaaaccccgtctctactaaaaatacaaaaattagctggacatggtggcgggcgcctgtagtcccagctactcgggaggctgaggcaggagaattgtgtgaacccgggaggcagagctttcagtgagccaagattgtgccactgcactccagcctgggcaacagagcgagactccatctcaaaaagaaaaaaaaaaaacaaaaacctgtgtagatattctgcccttaaggaggtagaacataattccccaattcttaaatgtgggctgcacacagtgacttccttccaaagggtccagtacagaaagaagaaaaaagagtaactttacaatggagaagtctggcaaagtttacctcagtcaggtgatcaaagtcagcatgaacccttcataagatgtggcaagaatggcacctgacctctggtcttcctctccaaaacccagaacctcagtctaatcatgaggaaacatcagacaaatcctgatagagggggattctaccatatgcctacccggtactccccaaaactgtaaggtcatcaaaaacagggaaggtctgagaaactatcacatccaagagtcaggatgattgtgaaatgggattctgaggggaaaaggacattagggggaaactgagtaaatctgaataaagtatggagtttagttaataatgattcattgtgacaaatgtaccatactaaggtgttaataataggggagaccacacctgtaatcccagccctttgggaggctaaggtaggaggatcacgtaagtttgagaccagcctgggcaacaatagtgagaccttgtctctatgaaaaattaaaaacttaggccgggcatagtggctcactcctgtaatcccagcactttgggaggccgaggcgggcggatcgcgaggtcaggagatcgagaccatcctggctaacatggtgaaaccccgtctctactaaaaatacaaaaagttagctgggcgtgatggtgggcgcctgtagtcccagctactcgggaggctgaggcaggagaatggcgtgaacccgggaggtggagctggcagtgagccaagatcgcaccactgtacttcagcctgggtgacagagcgagactccgtctcaaaaaaaaaaaaaaaaaaaaagaaaagaaaaatgtaaaaattagccagccatagtggtgctgcctgtagtcccagctacttgggaggttgaggcaggaggattgcttgagccctgaaggtcgaggctgcagtgagctatgactgggccactgcactccagcctgagtgacagagagagaccctgtctcaaaaaaattgctgggcatggtggctcatgcctgtaatcccagcactttgggaggctgaggtggggggatcacctgaagtcaggagtttcagaccagcctggccaacatggtaaaacctcgtctctactaaaaataaaaaaattaggctgggcacggtagctcatgtctgtaatcccggcattttgggaggccgaggcgggtggatcacctgaggtcaggagttcaagccccgcctggccaacatggtgaaaccctgtctctacaaaaaatacaaaaattagctgggcgtggtggcaggcgcctgtaattccaactacttgggaggctgaggcaggagaatcacttgaacccaggaagcagaggttgcagtgagccgagatcacaccattgcactgcagcctgggcgacaagagtgaaactgcatgtcaaaaaaaaaaaaaaatgagctggtgtggtggcgtgtgcctgtaatccccagcttccggaggctgaggcaggagaatctttttttttttgagacggagtcttgctctgtcgcccagcgcccaggctggagtacagtggcgtgatctcggctcactgcaacctctgcctcctgggttcaagcaattatcctgcctcagcctcctgagtacctgggattacaggtgcgtgccactacgccccgctaatttttgtatttttaatagagacggggtttcaccatgttggccaggctggtctcgaactcctgacctcatgatccgcccacctcggcctcccaaagtgctgggattacaggtgtgagccaccgcgcccagccggcaggaaaatctcttgaacctgggaggtggaggttgcagtgagcggagattgcgccagcctgggcgacagcgagactccagctcaaaaataaataaataaaataatattaactgggaaactgggtgtggggtatgtgggaactctctgtactatctttgcaataaataaatctataaatttagaagtctaaggccgggcatggtggctcacgcctgtaatcccagcactttgggaggccaagcggggtggatcatgaggtcaggagattgagaatatcctggctaacacggtgaaaccccgtctctactaaaaaaaaaaaaaaaaaaaaaaaatcagccgggcgtggtggcaggagcctgtagtcccagctacttgggaggctgaggcagaagaaaggcatgaacccgggagacggagcttgcagtgagccgagatagcgccactgtactccagcctgggtgacagagcgagactccgtctcaaaaaaaaaattttagaagtctaaaagtatataaaaaagaaaaaaaaagagaaaaagagttgcctgagcccttttgtggccacacagcactggcagggcagttaggcaggagcagcagggggtggaaaagaaagggaggcagaagaagcaggagatgctttatttcagaacaaggtacaataggccacacctctgtcctgcacctgggaaccttgggcatggatgagcagagcaaccacaggtctgaagagacaaagcagaggaagcctgagcgtgcttctcccctgtgtggaggggcaggccgccattgttgtggtgtggctcctttcatctcctcagctgtccagggactagggtatgaagggacaagaaaaccaggcccaatatcctctaaaattaagctgaggcaggagagggacacccaaggcgagggtgacaggcctttcttgttggctggagagccagtctccggccggattctggtgccaacggcaaaggaaggcccaaagtgagggcagcgcagagatgagggggctctcagggaaaacacccagggtgggagcaaccacagaagccccccggctgtgtccactctccaatcatgctggccttcttctcccccttggatgtgaccagacacatgcccagagctgcctgctcatggtgggttgtcctgcgttggggcagtctcaactactggtcccacagaagaagtcttcaggaagctcactcaggagtccatccaggtcatctacagagaggggaatgatgggtagccttagtgacaacatcagcattccatgtgactcaggtccaaagtttctgcccttcaggagggcctggacctggctgtatagctgggcaggcggctcctccaggcagtggtacccatgccaatgggcctgaggctggcctgacttccatcttccctctgctccccttgtacccgtacatgacaaaaggcgggggcgtaatccctgggccattctgacgaggaagaggattcccctgagcctcactgattcctctccttccatccagtcatagtgccaaacaagaaggcttcagaggtcacctagtgcaactctcattggctgaaggagaaagagggctgggaaaagccatcagatgtgttcagagttacacagttccttaattggcttctcatctgacagtggaaaatatcacccccttcctcaaagtgcctgtgtaagactacagttctcagatgtggtacttatgtccgagaacttggacacagctgacctcgataatccctagcaatattatttactagcagcagctaatactgactgagtgcttgctctgtgcctcaataaacattcataggtagggcatctccagttagctcctgttatcaaccccactttacctgaaacaaactttttttttttttttgagacagagtctcactctgtcgcccaggctggagtgcagtggcgtgatctcggctcactgcaagctccgcctcctgggttcacaccattctcctgcctcagcctcctgagtagctgggacttacaggcgcccaccaccacgcctggctaattttttatatttttagtagagatggggtttcaccgtgttagccaagatggtcttgatctcttgacctcgtgatccacctgccttggcctcccaaagtgctgggattagaggcatgagccaccatgcccggcccaccagccctaatattctataatcaactctctgtcactaccagcaaccttctggtgatgccttggcttgtctcacaaagaaagagtgcaggcttccaggcaatgcaagattccaggataagagacatatgctttttcacaagatataatggcctttgtggtttatccattggtatactgtgaattaggtagtgtgagaacacctatccataattgtgggtggaaacctacccaggtgccagggcaagagactgaaggcacaaactgttccagtataataaagaaaacagaataagaaaagttatactagaaataggatatagagatgattatatatggattttttttatttttgagatggagtcttactctgtcgcccaggctggagtgcagtggcacgatctcggctcactggaagctccgcctcccaggttcatgccattcttctgcctcagcctcccgagtagctggactacaggcgcccgccaccacgcctggctaattttttgtgtatttttagtagagacggggtttcaccatgttagtcaggatggtctcgatctcctgacctcgtgatccgcccaccttggcctcccaaagtgctgggattacaggagtgagccaccgtgcccagctatatatgaatattaccaatcattagtttttaatactaatctctgtattatcattataaccgagaaaaaaaacagccagtacagagtcaggagctgaaggcacattgtgagaagtgagcagaagacaagagtgaaagtcctctgtcacgccctgataagggctgcctgatgacaccttggtctagcagtagcgccagtgcctggtaaggcacccgttacttagcagacctcagtcttgcggtagcgccagtgcctgggaaggcaactgttacttagcagactgggaaagggaactctccttgggggagttcgagaacactgctccaccagctcttgtgggaggcctgacattagccaggcctgcccacaatcatctggaggcttcaacgtctccctgtgatgctgtgcttcagtggtcacgctccttgtccactttcatgttccgcctgtatacctggttcttcttttaagttcttggaagatagcagtagtgaattagtgaaagtattaaagtctttgatttctctgataagtgcacagaaaaaacgctgacatatgctgtcctccctctctgcttcagctaccacaaagggaaaggcccccatcacgtggacacgtgacttgcttgactttatcaatcttttgagatgactcacactccttaccctgcccccttgccttgtatacaataaatagcagcgcatccaggcatttggggccactaccggactccacgcattggtggtagtggccccttgggcccagctgtctttcctactttctcttagtcttgtgtcttatttttctataatctctcgtctctgcatacgaagagaaaacccacaaggcccagtagggctggaccctacatctggcacccaactcttgtcttctggtcacttctcacaatgtcccttcagctcttgactctatattggctggtttttttctcagttataataataatacagaaattagtactaaaaactaatgattggtaatatccatatataatcatctctatatcctatttctagtataacttttcttattctaactattttctgtattatactggaacagtttgtgccttcagtctcttgcctcggcacctgggtaggtttctgcccacatataatcctgtgaactttggggccagacaggattgaatttttggaattgaaaagctaaagaccaggctgggcacggtaggtcatgcctctaatcccagtactttgggaggcagagacagaaggatcgcttgagccccaagagttcgaggccagcctgggcaacatggcaaaactgtctctacaaaaaatttaaaaattgctgggcatggccgggcgcggtggctcacgcctgtaatcccagcactttgggaggctgaggcgggcagatcgcgaggtcaggagatcgagaccatcctggctaacacagtgaaaccccgtctctactaaaaatacacaaaaaattagctgggcatggtggcgggcgcctgtagtcccagctaatcaggaggctgaggcaggagaatggcatgaacccgggaggcggagcttgcagtgagctgagatcgcaccactgcacttcaccctgggtgacagagcgagactccgtctcaaaaaaaaaaaaaaattgctgggcatagtggcacatacctatagtcccagctactcgggaggctgaggtgggaggactgcttgagcctagaggccgaggatgcagtgaggcgtgttcataacactgcactccagcctgggcaacagaatgagaccctgtcgcaaaaataaaaattaaagtaaaaaaagctaaaactagatcctgaatggtgttagtttcacctgggtgatgctgccttctgaggaagcagctggcccaaccacaaggggtctgcatttgggcctctctggtttgtagcctggttttcccaaaaaccagtggacgtcttgactcctcagcactcctctaagcttactcaggatgggaaatctgcctctgtggtctggtcatcagcccacagaggactcagagtgtggcacaaagatagcgcctgtccatctggacaggggatggtgatgtttcctccttgtggctgatggcacataacctgaaaatgggggaaacctgtggatgacactttgttttacatggccccatcacactgttaacgagtttgtggcctgcagccttgccaaacaagacactgtatctgatttctgtaagattatataagatccaaagattcatggaaagaggaacaagatatagccaggaagattctggttcagctattcaacaggaaatagaacctctcttgctcccagatgggctgactgctttacctgcttctgggagttcttcctcaggggacgcctctgcctctaggttctgtgctgttctgaagccttcctcgggctttgcagccacatcatgctggaagctccctgaatcctggggacagaggatctggttaccaatgcctgtgtccctgaaatcccttcagatggcaccacctctacccagacaacctcaaacgaacagtgtggggctcaggaaagaaacatgatggggccaggtgtggtggctcacacctgtaatcccagccctttgggaggccgaggcgggtgaatcatttgaggtcaggagttcgagaccagcctggccaacacggtgaaaccacatctctactaaaaatacaaaaacagagccgggcatggtggcacacgcctgtaatcctagctactcgggaggctgaggcatgagaatcgcttgaacccaggaggcagaggttgcagtgagccaatatcgtgccactgcactccagcctgggggacagagtgagacccttgctccaaaaaaaaaaaaaaaaaaaaaaaaagaaacatgatggaagagtatggcagaggccagccacccaggcccatgctgaagggaggcagctgaaacaccaaacacccaaagcagcagataataaacaaaacaaaaaacaaacctcttttggctgatttgctttcctagttctgttggtatctaatattttagagattctctataactagagcagagagtgaagaggccattcagaaatacattgaagagttagcctgagatttaaaattagttgttaacaatccccaaaggaatatatagctaatatatgggcaggtaattaaaactggtaattaaggccaggcacggtggctgatacctgtaatcccagcactttgggaggccaaggcaggaggatcacttgaggtcgggagtttgagactagcctggccaatatggtgaaaccccatctctactaaaaacacaaaaactgggcctggcacgcctagttcatgcctgtaatcccaatactttgggaggctgaggcaggtggatcacaaggtcaggagttcgagaccagcctgaccaacatggtgaaatcccgtctctactaaaaatacaaaaagtagccgagtgtggtggcacacacctgtaatcccagctactcaggaggctgaggcaggagaatcacttgaacccgggaggtgaagttgcagtgagctgagaacatgccactgcactacagcctgggtgacagagtgagactccatttcaaaaaaaaaaaataaataaataccggtaattaaatggttaaccatggttagtcctaggaaataggagtggggaagggtaggacccattttttgcttattctgtgctattttgatttatttcaataagtatagataatttgaaatttaaaagaaaaataggccgagcacggtggctcatgcctataatcccagcactttgggaggccaaggcaggccaatcacctgaggtcaggagttcgggaccagcctggccaatatggcaaaactctgtctctactaaaaaatacaaaaagatttagttgggcatggtcccagctgttcgggaggctgaggtgggagaatcgcttgaatctggaaggcagaggttgcattgagccaaggtcacgccactgcactctggcctgggtgacagagcaaaactgtctcaaaaaaaaaagaaaagaaaagaaagaaaaagaaagggtttagaagtggggtgattttgagagaatgtggaggggctaaggggaaagatgaggaaaatggaagtggaaagttggagcttagatgaaaacctctgtctaagatgactagaggtcatcaagtcaaacgtactatagatgaagctgttgcaagggaggcaacaggacttgcccaaggtcacagtacacgttttcagtacacaagatcctaggaaggtggtgggggcagggcaagtcaagcccaggctctacactctcaacctggagtggatctgcctggaagcccatgcttacctcccataaatgccaaatgctcgtctcggttcctaaagaggatgtccccaccagtgctctgtgcagcttccccctaatttagcagaggcagatgccaagagggaagacacagagcaggtgctggctcacctgacaggccatttgtagctcactgttctccacactgccacctgtagcagatctgaccctcggtcatttactgccaccaccccctggtgggccctccacttggttagttctcaagtgactcctatcctctcagatgttcaagcctgccatcagatgctcagggatcaccaagaagccagctgctcctctaggtactgttactgagccatctgccaggcggctggatgagggataggagatggtcctgtccccaaagataccttttcacctcagagcacctgcccccttcagacctctgctccccagggtggaagagaggaagaaatcagaagatccaggcagaaggagggccttaccagtctcccgtttcttcctgctcctcttaccttggggaagggctgagatggcttgaggaagctcccatccccagaatccgggctgtaaatatggaccaggttgttgggtgtcacgttgaggtagtgatttcgaagtgaaggagaaaacactccaatctggagtcaaggaaagggaaggtcagtgtcctgatggagcactgggagctgccagatggacacctggctcccacctgcctttcacttggtgtcctctgcctagccttggtgccagaagagaaccatttgccacaatctccccttaacacaaccctccatccctatccaccctgaagaatgggggccagctcaagggccacaggccttccctgagctcaagccagggcctagcaatggttcagccactccgtgcctggtgttgtagaggaaggcagccaaacaggtaaggagacagacactgagggctctatccggggggcagtggtgtggagagctgctccccatacctgcttcagcagcagcactgagccaggcttcagctcattctggcacgtctccagcagcaacctgtgcaccgtcccctgcatctctcctgcaaataccacatggcccatcagtctcggggtcaagggcagcacagcgactggtatgggccctggctgggaagtgggctgctcactgcctcagttttcctgtctgcaaagggagagggtgattccacctcatttcctggcctcaatggagcccactcaccagacaacctaggacctaattccttacccgtggggtccttgaaaaccacactggcgtccattgtgctccgagtcagggacttgatcatcaccgccatgttggggaccttgttcctaggaagctgcttcagggctgcctgcttacaaggagaggcatatgctgagccttccacggcccacttgtgacttcccaggtctccaagtgtgccagggcaaccggggttaggaggggtcagagtatagttatagtgatgatcttctttgtggaggacaaggaggtaccccatctctctctgacagacctagagctgggaggtccttcatttctctcccctgcctccgttcttttttattttttgagagggagtttcgctcccaggctgggtgcaatggcacaatcttggctcactgcaacctccaccttctggtttcaagcgattctcctgcctcaggctcccaagtagctgggattacaggcgcccaccaccacgcccggctaatttttgtatttttagtagagacagggtttcaccatgttggccaggcttgtcttgaactcctgacctcgtgatccacccacctcggcctcccaaagtgctgggattacaggcatgagccaccgcacccggcctatttttttatttttgagatggagtctcgctctgtcgcccaggctggagtaccatggcacgaccttggctcattgcaacctccgcctctgggttcaagcgatgctccagcctcagcttcctgagtagctggacttacaggcgtgtgccaccaagcctggctaatttttgtattttcaatagagggggtttcaccatgttggccaggctggtctcgaactcctgacctcaagtgatctgcccgcctcagcctcccaaagtgctgggattacaggcgtgacccaccccgcctgacctgtttggtttttgtttttttcttgagtcggagtttcactcttattgcccaggctagagtgcaatggcacatcttggctcaccgcaacttctgccttccaggttcaagcaattctcctgcctcagcctcctgagtagctagaattacaggcatgtgccaacacgtccggctaattttgtatttttagtagagacagggtttctccaggttggtcaggctggtcttgaactcgcgacctcaggtgatccgcccgccttgacctctcaagattataggtgtgagccaccacgcccggccttgggttttttttaaaggagacaagctctcgctctattgccccggctggagggcagtggcacgatcatagttcactgtagcctcaacctcctaagatcaagtgatcctctggcctcagcctccctagtagctgggactataagacatgtgccaccacatccagctgattttttttttttgtatttttttgtagagacagggtctcgctttgttgcccaggctggtctcgaactcctgacctttgtgatccttccacctcagcctcctaaaatgctgggattacaggtgtgagccactgtgtccagcactttcttttgtttatatgtgtttacacaatgttccatcataacagtcacaggcagggatatgttggcacatgtactggcatgtctctgcacacaacccttaaccactagggagatttgagggtggcagtgtgctcaccccaccccacccagggcctggaagtgcagaggcataccataacccactctctccttccacctgggcccaatcctatggatgacagtgaaaaggtaggtaagtggaagatacaaccaaaggggcttcgtgctgctacttgtatagggtacgagggagcaaacagccccttcctaaggtggagtagggcagtaggtcagagagagggagaaaaatggtctttcctttgggtctcagcacccagaatccttaccttgcgcagcaccatgacaatgctgtaggtacagaggaagcagctagggtctctctcatccaggcctagcgtggatttcatggtcagccagggccctcgcccaaaatcctcctccacagatgcctgggaactagcaacaatctggtaccacagagcagagggggagcctgtatgaataggtctaccttgctacagactcttgattgaaacagggtggaagggtgagagaggaaaggcaaatcccctcggaaaaactgtagtacaatggccacagtctctcctctcatttatctccaaggccagaaaatggtatgtgacatcttttttttctctttttcttttttttttttctgattgctttggcatttgaagcacgtgaaaatcttgtcgcgtatcacaggtttcattcagcagatactctttttttttctttttaaaatcaggtcctgtctgcaggactaggtatgaaaaacaaatttttaataaaatcagctcctgggccagacgcggtggctcacacctgttatcccagcactttggaaggccgaggcgggtggatcacctgaagacaagagttcgagaccagcctggccaacatggtgaaacctcgtctctactaaaaatacaaaaattgactgggcgcagtggctcacacctgttaccccagcactttgggaggccaaggcgggcagatcatgaggtcagaagatggagaccatcctggctaacatggtgaaaccccgtctctactaaaaatacaaaaattagccaggcatggtggcacacgcctgcagtcccagctactcaggaggctgaggcaggagaatagcctgaacccaggaggcggaggttgcagtgagccgagatcacgacactgcactccagcctgggcaacagagcgagaatccgtctcaaaaataaaataaaataaaataaaataacataaaataacataataaaataaaataaaataaaatcagctcctgactttaactgcattgaagcagaaggctatctacgcttattttttgtaacagactcaaaaagtcttaggggtagggatccaccacatatatttataggcttccagagtggcttagccattttgaaaccagtcatattctatttggcatgcttctagctttaacaattaaccttcttacattaatacatgctttgaatccagagagtatctgctgctttggatctgaaatggactggcagatctgcggagctacagcagagaaaaaatactggggagaattaaaagcaaaactgggtttgagggcagagcaggtcaaccagaaccccaaggagaagggaagcagggtctcacccaccaaagggaacccagcaaaggcaagagaaggcagatccttcccagctcagttctcagaaacctgagaggaagggctcctgagacacaatctcataatacttatcacagtctcctcccccaggggaagctggagctagctgggcctttatttcttagatgggaaagaaggctggacccatggcatcagataatacctacctggcaccaggacaggcctcacttaatgccagtaaaattgctgcctcccccaactacctgcctcaaatgccttttagtgtgtgacaccagcaaacaggcctagcagcatcagctcttgattcttaactcctgaaacacacagggacgcccctcactctcaaatcacacccagaaagttaacatttgcataagttacctctgtctggaatttagccagagcaccatgggttggagtttggggcgcggaaaccatgatgtcctccagacttctcccactctgctaagaggggagggaaggagaagatgagagcaagcttagcagctgttatttacaagtacagcttattgtctggtttacataatgagttcaggaaatgatcagggactattaacacatattacatctctcctaacaaagtctcaggagcctctttggcagctcaaaaaagatactttggggattggtttgaaaacgtgaggaagccggagctcgcccaggtgcaaaaaccagggctgcctgaagggggcagtgacccaaatagagaggcctggctgggcgtggcggctcacacctgtaatcccagcactttgggaggctgaggcgggtggatcacctgaggtcaggagttcgagaccagcctggccaacatggagaaacccccatctctaccaaaaatacaaaaattagccaggcgtggtggcccatgcctgtaatgccagctacttggaaggctgaggcaggagaatcacttgaagctgggaggtggaggttgcagtgagccgagattgtgccactgcactcctgcctggacgagagagcaagactctgtcttaaaaaaaaaaaaaaagaaagaaagaaagaaaaattgagaggcctgtgatgagcaaaggggcagctttccccaagtcctaaccctttcctccagggagatccagcccaggaggaacatagacggcctctttggatatctgctaacatgctagggaagagcaagtaacaggcagaaattgtttcaaacacccttaaaatgggaggaagagggcacacctatcacaaccagtccagatcctcagagtccaattatctgggatctgatccaagactagtttaatccaagtctcaccagggctgtctccttttcagccccagcttccccacacctgccacaatgaactgttctgtggatctgagagcaccttgctcttctgcctctgtgcccttacacatgctcttccctgctttcccactgccagaacatccacagagcacagcgcccgctccgccacacacctgttaacctcctactcatccatccaaagcccactcagcaagcctaaggcagagccagtgtcttcccagcacccagggaatgacccctgttcacactgtgtgctttgtgcatgtttgtttgtttacatctgtttcttccatttcactgtaagttctttaggacaggaactgtttcttttaatctctgtattctcagttccaagcaaattgtccaacacataagaccttaacaaatgcacaagaatgacttcctgccctagtgcacacctgtagtcccagctatatgggaggctaaggcgggagaatggcttgagcctagttcatgaccagcctgagcaacatagccaatctctaattcttaaaaaaaggaaaagagggtcttcttaaaaaaaggaaaagagggtcaggcgtggtggctcacgcctataatcccagcactttgggaggccgaggcgggcagatcacttgaggtcaggagttcgagaccagcctggccaatatggtgaaactctgtctctaccaaaaacacaaaaattagccaggcatggtggcgggggcctgtagtcccagctactcaagaggctgaggcaggagaatcgcttaaacccaggaggcagaggtttcagtgagctgagattgcgccactgcactccagcctggatgttgcagcaagactccatctcaaaaaaaaaaaaggagaagaaaaaagaaaattatgatgtcctcagagccttaagcacttcttcacagtggattttctagcattcagttcttcccttttatttctcctgcagctttgaaaagcctctctgcacttccttccttccttctctgcaagagggaagatatgctagggctggacagtgctggaaccctgcttctctcccttgcccaccaaatcctagaaagccagctcactcacctggtgaggcaggatcccagctgggccagggaaacggcgagttttggctcgggtggagggatgggtgggctgctggggtgtccggctggcagcagtgactagctgcaccaggtggttggtgactatgggtgtctgcagagctccctggggaccttttggggtaccaacaggagacccaatggaagacactggagcttgcggttgtaagggtatccgaggaaataatccagagctagtccttgagggagtagaacagcttgagttgggagttcgaggtctgggtaaatgagctttgccacttaaccaggaacttggagactggaatggctgacaagggaaacgattttgagggctgctctgaatggtccctctagcagcttggagaggctgaagtgcttgaacaggggagcgttgcggacagacttcccagtggagttgctgagtgggaactgttaaggcagttggaacaggaaggtgacccacagcaccaggtctcaaggggggtcgtggagtcctacattggatgacaggatctagagactcatcctgggcggacatgatacccgctttgtggatggcaggcacaggccccttctggcaagatccactcagatcaactacccgggcttttttagccaatactgaaccctcccgctgctgggcaggcaggattggtatggcctcactgctgactccacattccagctccatgccaggctcctccaactccatgcttgccaggactttatcaaattcgtcttgttcaggcccctcaaagccaccaacttgctgctgttggctctcaaaggtgagtagggggtgtaaggctgaggactgaggtcttgctgtctctctgagcacttctgtcactgtcactcttctctgattgccaatccagctgctggaagtagagacaggccttaggggagctgctcctatgcatgatggacggctgtcagcactgggcgtgctggaggcagggaggcagaggtccaagtctggcaggcccaaagcctctgagggagcagtggggtgtaacagcagcagcctggaggactgtgcctgcacagtctcctgtggcctagaagagacaggtctcaggcgcccagcattcacaggcagtgagccagtaaaccggttctctgcatcctccacagcagacaagaaatcctacaaggaagcagagatggtaggtcttggcatctggaaatcaagaacccctctgcttttactgttcaggcacatggcgtgtatgtttgtgtgtagatacttgaaagaaaccaaagcatgagggtcgggcatggtggctcatgcctgtaatcccagcactttgggaggccaaggtaggaggatcacttgaggtcaggagttcgagaccagcctggccaacgtggcgaaaccgtctctactaaaaataaaaaaattagctgggcatgggggtgcacacctgtagttccagctactcgggaggctgaggcaggagaatcacttcaacctgagaggcagaggttggcagtgagctgagatggtgccactgtactccagcctgggtgacaaagtgagactctgtctcaaaaaaaaaaaaaaaaaagaaagaaaagaaaaagaaaaagaaaccaaagcatgaaagccaatagtggtgtctcttaccacctctgacctcacccatggccctacacaaggctctatcaaaaacactccaatctaaggctaagtcttcaggtaacctctttcttcagtcttcatgggtggggagaggggcagttagaggagaacagcaggagaagcaaacgttccagggaaccaagaagtcagacaaatcaccctaggtcacacaacaaccatctcaaggagaccactttctggtgtctggcctgttatctaaacagggatctatccagctggtcatgctgcctgtccttagctcactcctcatccccaatacacactcgtgtgctctctttctctctctctctctcacacacacacacacacacactacacagagatagctacccttcagtaagccagagaggacttggagccagcaaaaaaggcagaagttaaatatagcttttcaggcaagctaaataaagtatggattccagttgggaagcaaggtgagattgacaccttcaagagcaacagacctgttctgagggtggttttgagtcagaactgctgatttaactgacaggagggtccccaccacccccaccctctgctactgcactggattgtctgggctacagaaaggctttttcctgctttgtgtattattaagtgagtcccatactcaggcaggacaaccacaggactcaacaataataataataaccagaactatagcagtaataaaatcctgatgactctggaggttgatggtcttttttctcccaaagagctcactctcagacatgacatcatctgctttaggaagggggaagggactgatctgccattttcaaggaacagaaacttcagctgtcagattcctttactctaattccattactcacttagcagtcccatcatcaccttgtaagacccaagagggtcattttaacagtcactttttcagcctgtaatcacatatctccaaagctgaaagacaaagacaaggacacatctccttgacaaaactggcagttgtgaattatttgtaaaagcaaaaatcaggacgggcccactggctcacacctgtaatcccagcactttgggaggccgaggcagaaggatcatttgagcccaggaatttgagaccagcctgggcaacttagtaagaccctgtctctacaaaaaaacgaaaaattagctgggcatggtggcacacacctgtaggcccagctactgaggaggctgaggtgggaggatcacttatgcctgggaggttgaggttgcagtgagccgtgattgtgccattgcactccagcctgggtgacagaaagagatcctgtctccaaaaaaagaaagaagttcacacagtgggggctgccgggggcagggaggtggagagcatcaggaagaatagctaatgcatgctgggcttattacctaggtgatgggatgatctgtgcagcaaaccaccatggcacatgtttacctatgtaacaaacctgcacgtgtacccctgaacttaaaataaatgttgaagaaaaggaaaaaaaagaaatatccctggctgggccattcccagaaattctgatttaattggtgtgtggtagagcctagacaagggtaattctaacgtgcgagctttggatctagtctcacccctcatcttgtgattagacagagggaagggaagaacatctgaggcagaagagcatccctcatattgtagaagagaaaacagaagaccagagaataaagtaacttgccctgattcacatagccaattgctgacccctggcctcctgccatccagtaactatgctatctcttacatggttctggctctacatacacagcccttcccactgcaagtatgttatcatagaggtgaattaaatcagctagatgacacagcttccaggaaagagcccttataatttaaaggtatgacaattaggcaattcattgctctggttttttgtttctaagacagttaagtaggttgtttacacttctcatcacttctcagcacctcacaggcaaaaacatacacatgtcaactaaaaggaggctggtacaggctaatccaaaatgttctgaacctgagtgtttacattttaagacctcgtctgccacctctgatcatcaacacttccctacctcatcttcaaactcctcttccacagcaaacagcttctgcaaactgcacgcctgaaaagaaaaaaaaccaactggggttgagaaataccatttgcaagcacattctgtcctcactctgcttcttcccagcactaacaataccatcaggtatattgttttttgtttgtttttgctacggctgggaaaggactaaggaatgagaagaaatgggatttcgttaaagacttaaacaatctagggccgggcgtggtgactcatgcctgtaatcccagcactttgggaggccgaggcaggtggatctcctgaggtcaggagttcgagaccaacctggccaacatggagaaaccttgtctctactaaaaatacaaaagttagctgggcatggtggctcatgcctgtaatcccagctactcgggaggctgaggcaggagaatcgcttgaacccaggaggcagaggttgcactccagcctgggcgacagagtgagtctgtatcaaaaaaaaaaaaaaaaaagacccaagtattctaaaaaacttacttagctgtgtgcagtggctcattcctgcagtcccagctacttgggaggctgaggtgggtggatccctagagcccaggagtttgaggctaggctgggcaacatagtgagacccgcctcttagaaaaagattaaaacactttctgccaggcacggtggctcatgcctataatcccaacactttgggaggccaaagctggtgaatcacctgaggtcaggagttcaagaccagcctgaccaacacagtgaaaccccatctctacttaaaatacaaaatttggtcgggcgtggtggctcacacctataatctcagaactttgggaggttgaggtgggggcggatcacaaggtcaggcgttcgagaccagcctggccaacatattgaaaccctgtctctactaaaaatacaaaaaattagctgggcgtggtggtgggcatctgtaatcccagctactcaggaggctgaggcaggagaatcgcttgaactgggaggcagaggttgcagtgagccgagatcgcaccactgcacaccagcctgggcgacagggcaagactctgtctttaaaaaaaaaaaaattagccgggcctagtggagcatgcctgtgatctcagctacttggaaggctaaggcaggagaattgcttgaacccgggaggtagaggttgcagtgagccaagattgcaccactgaactccagcctgggcgacagagcaagactctgtcttaaaaaaaaaaaaggaaagaaagattaaaaaactttcttgtaacataatccactcagaaccatctgcactaatcctggaagggaagaaagggggcaaagggaaggctgcctaggggagcaagggcagttctccaggactgtgcacatgggcgtaaacattttgtttttgtcttttgttttgagacagggtcttgccctattgcccagactggagtgcagtggcaagatcatagctcactgcagcctcaatctcctaggctcaagtgaccctcccacctcaacctcctgagtaactgggactacaggtgtgcaccaccgtgctcagctaattttctttttttttttttcttcctgagacggagtcttgctctgttgcccaggctgaagtccagcggcacgattttggctcactgcaacctccaccttccaggttcaagcaattctcctgccttagcctcccaagtagctgggattacaggccaagccacaatgcctggctatttttttttgtatttttagttgagacagggtttcaccatgttagccaggctggtcttgaactcctgaccttgtgatctgcccacctcagcctcccaaagtgctgggattacaggcgtgagccactgcgcccaggctaatttttaaatttttatagatacggggcctcactacattgcccaggccagtcttgaactcctgggctcaagtgatcctcccactgtggcctccaaagtgctgggattataggtgtcagccacaggctgggcatggtggctcactcctgtaatcccagcactttgtgacgccaaggcgggtggaccacctgaggccaggagttcaagaacagcctggccaacaaagtgaaacctcgtctctactaaaaatagaaataagttagctggggtggtggtgcccgcctgtaatcccagcttgttgggagtctaaggcaggagaattgcttgaacctgggaagtggaggttgcagtgagcggagatcgcaccactgcacttcagcctgggccacagagtgagactctgtctcaaaaaaacaaacaaacaaaaacaggtgtcagccacggcccctggcttgggcctaaggattttgcaatatcccaaaggtttcgcctgaccaatcttatgtcaaacataagagaaactaccataaatccaaacatgtctgcacagtggcattgtttctgcaaatgaagccagtagtttccctacctaatccaaggcccaaaaactagggtcccaggagagtaggatgccccagtccacggttccttctttctagccagcagggctgctgtagccagttcctgatgagtgtcaaacccagatcagaggtggtgcctaaccccagatgccagagccgcaggagctacagctggcgatacagttcccaagactctaagggtcagagtgaaaggggtgggcgggagacgacggttgcagtgagcagagatcacgccactgcactccagcctgggcgacagaacgagacttcgtccaaaaaaaaaaaaaaaaaaagtagaaagtgtggggcggggaggggaaagggatggacccaagcggtagtgacgtctgagcgcactggaaaggggggtttcccaggagggtaggaaggcaacaggagggaaactgaggcccgggggaggagaatgctttctcagggtctccggcgcgtccatgacaagccctgacgacagcccaggtctcccgactccgccgaacccccacccagaccccggtcctgcaacttgcgcgggcgaggggctggaaccccatgagcagttccggaggccagggggccctgcggcccgccagcccccaagctgggcgcggcattaccatagcgacggcgggtgggcctcggcggggaggttggcccggcaccccgagtccggggagtcgccggggccttggacacgacccaggtggaagtctcggactccgagggacagtgcttccgggctggggtcagagggatgagtctctgcgatatagggaaagtcgccaggagactggcggcaggcgccttaggccgcattcgaagacgccgccactggggcgtctccgccttcttaaaggggcaggcatatttctttcccgccgacacaaagggccttctcactgtagtcttccgctctggtcttaaaggggaaacggatgggctctcggtcgcccccaagcggctcctcttcccagtcggctggttcagcactggttcaggtgagatcaagcatcttggccccacgatgcctaatcctgcccccgcccctttcttttccgttcttttttttttttcttttttaaaccgaatctcgctctgtcgcccaggctggagtgcagtggcgcgatctcggctcactgcaacctccgcctcccgggttcaagcgattctcctgcctcagccttcgaagtagctgggattacaggcgtaagccatggcgcccggcctccctgcttgacttaatactgcttcagagcaagactgtggcttttcacctttgtgaaccagcatgtggcacattgaagacactcagaaaatgagtttgtttttgttttgagacttactttactcccttacccagcccggagtgcagcggcacagtcatggctcactgcatcctccacctcttgggcccaagcagtcctcccacctcagcctcctgagtagctgggatcacaggcacacaccaccaaacccagttaactttttttttttttgacacggagtctcacattgttgcccaggctggagtgcagtggcacgatcttggctcactgcaacctctgcctctcaggttcaagcgattctcctgcttcagcctaccaagtagctgggattacaagtgcccgccaccacgcccggctaattttttttttttttttttttttttgagacagtctcgctctgcaggacaggctgcagtgcagtggcatgatctcggctcactgcaacctcttcctcctaggctcaagcaattctcctgcctcagcctcccgagtagctgggataacaggcatgtgccatcatgcctggctaatttttgtatttttagtagagacagggtttcaccatgttggccaggctggtctcgaactcctgacctcaggtaatctgcccgcctctgcctcccaaagtgctgggattacagacgtgagccactgcgcccagccacgcccagctaattttttgtatttttagtagagacagggtttcaccatgttggccaggatggtctcgaactcctgacctcaggtaatctgcccgcctctgcctcccaaagtgctgggattacagacgtgaaccactgcgcccagccacgcccagctaactttttgtatttttagtagagacagggtttcactatgttgcccaggctggtcttgaacacctgacctcgtgatccacccgcattggcctcccgaagtgctgggattataaacgtgagccactgtgcctggcctaagcccagctaatttttttatgtttatttgttgtagagatgaaggctccctatgttgcccaggctgaacaagtgtttgttgaatgacttgatgccatttgtcaggagggagtgcgaatggctgggcaactcaatgctcacttccgcggtggctcttgcctgtaatctcagcactttgggaggcagaggcgggcggatcacaagggcaggagatcgagaccatcctggctaacatggtgaaaccccgtctctactaaaaatacaaaaaaattagccgggtgtggtggcgggcgcctgtagtcccagctacttgggaagctgaggcaggagaatggcatgaacccggaaggcggagcttgcagtgagccgagatcacgccactgcactccagcctgggcaacaaagcaagactccgtctaaaaaaaaaaaaaaaagaaattagccgggcatggtggcgggcgcctgtaatcccagctactcaggggactgaggcaggagaatggcttaaacctgggaggcggaggttgcagtgagctgggatcatgccactgcattccagcctgggcaacaaagtgagattctgtcgcaaaaaaaaaattaaaaaataaagaataatacatcttccagccgggcgcggtggctcacgcctgtaatcccagcactttgggggaccaaggcaggcggaccacgaggtcaggagatcgagaccatcctggctaacacagtgaaaccctgtctctactaaaaatacaaaaaattagccaggcgtggtggcaggcgcctgtagtcccagctacttgggaggctgaggcaggagaatcgcttgaacccgggaggcggagcttgcagtgagccgagatcgcgccaccgcactccagcctgggagacagagcaagactccgtctcaaaaaaaaaaaagaataatacatcttcctcacaaggttgttgtgagattaaatgaattaatgcattgaaatggctaacgccatgcctggcctattaacaggacctcaacaaatgtggattcccttcccccttacttgaatttgcaaacacgtgctgggaattgttatgggaaccacatggcttgggtttgtatctatttcagtatacttgcaaatgcatttcaccctaatttgttttttttgttgttgtttttttggagacggagtctcactctgtcgcccacgctggagtgcagtggtgggatcccagctcactgcaacctccacctcccggattcaagtgattctcctgcctcagcctcccaagtagctgggattacaggtgtgggccaccacacccaactaattttgtatatttagtagaaacggggtttcaccattgttagcaaggctgatctcaacctctcaacctcaggtgatctgcctgccttggtctcctaaaatgctgggattacaggcatgagccaccgcggctggcccctaatttgtatttttatcgaacaaacagttgtattcgagtcagtgtgatgacatacttttttttatgtgtttatctttacatttgccttggtatggacggtggcatatttggataggaagtgtgtgtacacgctgagaatcttgtgtaggtgattgggtattgcccgttgaatacgtgtatggaattaaatgtgtgttgtttgctgcctatgggggcggggaggactgatctgtttgtgtagctttgtgtgcgaaggttgtggattctgagttggtgtgtaggcagctatgtaaaccagagctgtccgatagaactttctgtgttgatggaaatgttttctattcacactgcccaacagagtagccactgaccatgtgtgtctattaagcacttgaaatgtggctactgcagctaagaaactgaagttttaattgtgtttaattttaattaatttaaatgtgaataaacactagtacaccacagactgaaacttcaaggttattcacacactagatggtgtgcatgcccctgcctcttaccacagaaatcccatccctcgtgtccgaccccagtggagccccacctgggcgtgtgcgtacatgtgtatgtgcgcatgtgtgtgggtgtgagccgtacctagggggccgcccccctacccaagtacccagccgagcagtgaatcagcctgacaatgaggtgagtcattcatgaactgctccaggctggcccagcgggcgggaagcaaacgtcagccagcctggaagccctacccaccccagccccaccagtgggatcgctcaaccccacgcactgcagatgttgttgaagcaactgacgcgggcgaatcaaggcacggaagctcggcccctccctctagtttgcaatccattcatccctcagcttctctctcccctccagtggcatgtgagtcatctcaagatctccctgaggacagagacattcagctcctctatcctttacacccctgatccgacacccacctccccaagcctatcccaattgcttctccctcaaggctgggggctgggggaagggaagctggaccccctggggaggtgccagggtcctgcttcataagcaaagctgacccactcagggctgtgggagttggctcagggtcagttgcagctggctggatcctgcggaactggcaccttgcttgcttgggcagcaggaaaggagttgcccagggatgctatgtggagcacttgtggcttccggggaggaccaggtaggcagggggcaaaagtattcctctggtttccaggaaagaccctcatagtatctccccagtggctgacaatcttcagagcctggtaacttctctcctctgcataccccctggtagagaatgggttgtgtggcccattctttcattaattagccttattctcttggacttaacattacctgatgcttctgacttggacaactgggtagtggtgtccttcactggatcagaaaataccctcaaaagccttgaagttatgtacaccctttgacaaagcagctccacttctgagaactcatcctgagaaaataatacagtcattgacgcatgccaagatttacctataagaatgtgcatcacatgggccgggcgcggtggctcacgcctgtaatctcagcactttgggagtttaagaccagcctggccaacatggtgaaaccccatctctactaaaaatacaaaaattagccaggcgtggtggtgcacacctgtaatcccagctacttgggaggctgaggcaggagaattgcttgaacccaggaggcagaggttgcagtgagccaagatggagtcactgcactccagcctgggcaacagagcaagacaccatccaaaaaaaaaagaaagagaatgtgcatcacaatttgcttgcccgcccttccttccttccttccttccttccttccttccttccttccttccttccttccttccttccttccttttctttctttctttccagagtttcgctcttgttgcccaggctggagtgcaatggcttgatatcagctcaccacaacctccgcctcctggattcaagcaattctcctgcctcagcctcccgagtaactgggattacaggtgtgtgccaccacgcctggctaattttttttttttttttttttttttttttggagagaccggggtttctctccatgttggtcaggctggtctcaaactcctgacctcaggagatctgcctgcctcggcctcccgaagtgctgggattacaggtgtgagccactgcacctagcccacagcattatttaaaatggaaaaattgggccgggcacggtggctcacgcctgtaatcctagcactttgggaggccgaggcaggcggatcacaaggtcaggagatcgagaccatcctggctaacacagtgaaaccccgtctctactaaaaatataaaaaattagccgggcgtggtagtgggcgcctgtagtcccagctactccagaggctgaggcaggagaatgacgtgaacccgggagtcggagcttgcggtgagccgagatcacgccactgcactccagcctgggagacagagcaagactccatctcaaaaaaaaaaaaaaaaaaaaaaaattggaaacaactgacgcatccgtcaaaagagcatcaagtaaagaaactacggctgggcgtggtggtgcacgcctgtaatcacagcactttgggaggccaaggcgggtggatcatgaggtcaggagatcgagaccatcctggctaacacagtgaaaccccgtctctactaaaaatacaaaaaattacccgggcgtggtggcgggcgcctgtagtcccagctacttgggaggctggggcgggagaatggcgtgaacccgggaggcagagcttgcagtgagccgagatcacgccactgcactccagcctgggtgacagagcgagactccgtctcaaaaaaaaaaaaaaaaagtaaagaaactacaataaaacaatacaatggaataccatgcagccacataaaatgatgttgtggaagatttaatgccatgggagtattttcatgatatattacatcaaaaatcagactgtgtgcttgcttcggcagcacgtatactaaaataggacccatatacagaagaatgccatagaccctgcacaagaatgacacgaaaatttgtgacgtgttctgtatttttccattttaaaaagtttgtaaaaacagccgggtacggtggctcatgcttgtaatcccagcactctgggaggccaaggcaggtggatcccttgaggttaggagttcgagaccagcctggccaacatggtgaaaccccatctccactaaatatataaaaattagccgggcatggtggtgtacacctgtaatcccagctattcaggaggctgaggcaggagaatcacttaaaaacgggaggcagaggttgcagtgagccgagattgtgccattgcactccagcctgggctgatagagcgagactccagctcaaaaaaaaaaaagtgtgtaaaacaaaaaataaggaaattgtaaaaatcaggtataacatcaggcacaatggctcacgcctgtaaacccaggactttgggaggctgaggtgggcagatcacatgaggtcagaggtttgagaccagcctggccaccatggtaaaacctggtctctattgaaaatacaaaaattagctgtgcgtggtggcgcacgcctgtaattccagcttcttgggaggctgaggcaggagaattgcttgaacccttgaggcggaggttgcagtgagccaagatcgtgccattgcactctagcctgggcagcagagtaagactctgtcgcaaaaaaaaaaaaaaaaaagtataaaatgtagccaggcagggaagcatgtgcctgtagttccagctattcaggaggctgaggcagggagatcacttgagcccagaaggtcaaggctacagtgagctgtgatcacacctctgcactccagcctgggcaacaggaaaccctgtcttaaccacaacaaaaccaataataataataataatgtccaccctgaggagttttggggaggattatatctgcttctgtgtctgctgggcagaagtgtgtcatcatggatgggccagaaatcctgctgttggaggatgatgaaatgtgccttccatacgccatcaatgcaggacttcctgccagggtgttctgggtcctcaggctgtctctgcctgtttgggggagaccccatgtggctatgcacccagagagtctgggtcctgtcacttattgactgtaagctccctgagcctccgtctccttacccatacaatggagtacataatatctaccttgcagagttgttatgacaatgataatatatgtgacagtcttttgaaaagaagtcgttcaataaatgattacaataaaagatgtgcaaaatgtacgttaacccaaaactgcaggctggagggaaggcatttgggtgagttttggggtgccagtagtccatacctttccacatagcctgtaagttcactgtgtattgttcactatcgtttcatgaccttatggctcagaaggtcttccagaatcacagggtccacctctctaatcacagaagggaaactgaggctcagagagggcaagtgatttgcctaaatttccaggccccctctctcctactctgctccaccctgcttcatgtggccatgttgcttccacaggatggaaagctccccgagggcaggtacatgggctcccactatcccctcccgacattctctgggcacgccctgcccagagaggacactctggaatgacctgcagacatgtgggacatgatcgaccaccactgccacttgcactgttgtggccatgtggccttgactcttgagcaggcaggcaggaactctgtagagtccaggaaatcctgggcctcagctccacatcccagcagggaggtaggggagaggataggcttccttctcagccatctccttggacttctgctatttttgctgctgggaggggtaagaaggcttgtgggacactctaggaacctggagggagctgggctgagaagcctgtcctggagtcccaactgtgtgccaggcctcctggtcatctgctgtcctctagcaggtggctggctactgatggcagctcttggtggatatgggatctacagaccagcagactgacagctttgctctgctctctctacatatataaaaaatcatttatttctttaggcgccatgacaaacggtggcagctgcacccagaatagtctttatttttaaacaaattcacagcttgttctaggagccatgtttctgctggctttcctcagggttggccattgctgagtgtagagacagtggcctgctcctgatctctaggccaggaaggcaggaggtgggaggcctgaaaagggacagaaggtgtcaagggttaggtagggctctcaggtgaggaatgactgaggctctcgcctctagccaggtcctcctttgtttgtttgtttgtttgtttgtttgtttgtttgttttgagatccaattctagagttagctgccagagctggaaaaatcctcagatgtcatctatccaaccatgcccttttacagacagggaaactgaggctcagataggtggtgacttagccaaggtccctgcctgttgctctccccctaaacatctcaaacagtcaggcaagactgcacagtggatgctggcctgaaactggtttcttctccctcaagcccagaggagtcaggggaaggagggaaaggagaagaagttgttgttccacccttccttctcaacttcaccttgttgcaccacccagaaaagtctccagctggaaggaaggaaattcagtccaaccctctaatcataaagaaacaggggcccagaagccaggcgtggtggctcatgcctataatcccagcactttgggaggctgaggtgggtggatcacctgatgtcaggagttcaagatcaacctggctgacatggtgaaaccccatctctactaaaaatacaaaaacttagccaggtgtggtggcaggtgcctgtaatcccagctactcgggaggctgaggcaggagaattgcttaaacccaggaggcagaggttgcagtgagctgaggtcgcaccattgcactccagcctggacaacaagagcgagactccatctcaaaaaaaaaaaaaagaaagaaaagaaaaagaaaaagaaacatgggcccagagagaagggactttcccagggtcacacagggagacctgggccaaacccaggcatcctaggggcagttttcagttttcattgcactctgcataagtcatcctcaatgacattgcctttactttgtgcctagggcacatggcttatttgtcaggaaattaactctcttctgtcttcagagctcattgtaaacagcccaagggcaggactggaccttgactatcttggaggaatgaaggtccagcttaaactttgccacccagttccatgctggacattgtcatatctgccatcatatctaatttaggactcatgaagtgtcagaactgaaagggacctcagagaacagaagttcaagtcctattttccagataagaccaaggccctatgggcaaatgactcatccaacagcactccagcccagagttgtctctatccctaagacccagattttcttacctcctgtcctgttgtttttgtttgtttttattttttgccttccccacagtacctagcattgtgctggcctcataacttttctttctttctttttttattgagacaaggtctcactctgttgccaaagttggagtgcagtgtcctgatcttggcccactgcaacctccacctcttgggctcaagcaatcctcccacctcagattcccgagtagctgagaccacaggcctgaaccatcactcccagctaatttttgtattttatttatttatttatctatttttttgagactgagtctcactctgttgcccaggccggagtgcagtggtgtgatcttggctcactgcaacctctgcctcccgggttcaagcgattctcctgcctcagcctcccaagtagctggggttacaggtgcccatcaccacacccagctaattattattattatttttttttagagacgatgtttcaccatattagccaggatggtctcgatctcctgacctcgtgatcagcctaccttggcctcccaaagtgctgggaccacaggcgtgagccaccgcacccggccccacatccagctaatttttatatttttagtagagatggggtttcaccctgttggccaggctcgtcttgaactcctgacctcaagtaatccacccacctcggcctcccacagtgctaggattacaggcgtgagccactgcgcccggcataatttttgggttttttgtgtgtgtgtgtgtgttttgttgttgttgttgttgttgttttgttttttttttgacagagtttcgctcttgtcacctaggctggaatggaatggcgcgatctctactcacagcaacctctgcctcctgggttcaagcgattctcctgcctcagcctcccgagtggctgggattacaggtgtgcactgccatgcccagccaatttttgtaattttattagagatggggtttcaccacgttggacaggctggtctcgaactcctgacctcaggtgatcagcctgcctcggcctcccaaagtgctgggattacaggtgtgagccaccatgctcagccaatttttgtattttttagtagagacgaggtttcaccatgttggccaggctggtctcaaactcctggcctctagtgatcacctcccttggactcccaaagtgctgggattacaggtgtgagccactgcacttggcctacgacttttttcatgattccagataggactggcaactcccggatggcctagcagcattgctgaacacattcattcctctccttgctgccttccaaagtccaatcatgctgccatctctcaggctatcggttaaatatctggcttttctctgagatttatttccttctaccaagaggccaaattcaccactggttcccagggtcagaagctctccagccagcttctagatcccatctgcaggctcactctacattgagaaactgaggtggtggtgaaggagacagtctcgtgacccctgtttccatggtgaatggtcctggcaaggatatctgtctaccctaggaactcacaacaaaagacaattatgttttctgtaaggaacttgagactccctaaaggcagaatcatctctatatcctcagcatctctcacaggtactccagaaacatgacaaatgcatgctgaattatttagcccccacttacctgagaagacgaaatctgaagacttatcagggccccatatggtacatttttgtaacttctgggacattcggccactgggatatggacacgataatctcagagacctccagagaagaaggctaaagctctggggttgggagtccagcttcatcagcccctgttccttgtgttaggaaacacagaaacctgggcttttttttttttttttttgtgagatgagtctcgctctgtcgcccaagctggagagcagtggcgtgatctcggctcactgaaagctctgcctcccgggttcatgccattctcctacctcagcctcccgagtagctaggactacaggcgcctgccaccacgcccggctattttttttgtatttttagtagagacggggtttcaccatgttagccaggatggtctccatctcctgacctcgtgatctgcctgcctcggcctcccaaagtgctgggattacaggtgtgagccaccgcgcccagccactgaaacctgggtttgaaccccagttcttgcttgtagaaactctgtaactttggacaattatttatttatttatttatttatttatttattatttttagacagagtctccgtctgttgcccaggctggatgcagtggtgtgatctcagctcactgcaacctctgccttccaggttcaagcaattctcctgcctcagcctcctcaaatagctgggactacaggtgtgtgccaccatgcccggctaatttttttttttttttttttagtagagatggggttttgccatgttggccaggctggtctctaactcctgacctcaggtgatccagactttgggcaagcaattattaagcttccctgagcctccgcttcctcatctgtaaaatgggaagtgccaagccaatgtgctccacgaggcagttattgaccatcatttgtcatattacagggggagattcttttcccatgttctgagatcccaagagagaagattctggaatcttccagtgtccccaaacttttagtgagcacctactatgtgcaaggtgatatgctaggtgctagaaaggcaaaaagacatatgattttatctcttttctcaagtggctcataatccgtttggggagacaaagcacaagccttgtgaaagcaaactcccaacccaactcatcctaactgccagaagatggcgaaagactgtgcaagtgcaataacaaataggtgatgccggccaggcgcggtggctcacacctgtaatcccagcactttgggaggctgaagcgggcagatcatgaggtcagaagttcaagaccagcctggccaagatggtgaaagcctgtctttactaaaaaaatacaaaaaaattagccgggcatggtggtgcacacctgtaatcccagctactcaggaggctgaggcaggagaatcacttgaacccgggaggcagaggttgcagtgagctgagattgcgtcattgcactccagcctgggtgacaagtgcaaagctt

SEQ ID NO: 4 - DNA, 4925 bp, Homo sapiens
  Genbank Accession No. AF155135
gaagcggcgggcggggtggagcagccagctgggtccggggagcgccgccgccgcctcgatggggtgttgaaaagtctcctctagagctttggaaggctgaatgcactaaacatgaagagcttgaaagcgaagttcaggaagagtgacaccaatgagtggaacaagaatgatgaccggctactgcaggccgtggagaatggagatgcggagaaggtggcctcactgctcggcaagaagggggccagtgccaccaaacacgacagtgagggcaagaccgctttccatcttgctgctgcaaaaggacacgtggaatgcctcagggtcatgattacacatggtgtggatgtgacagcccaagatactaccggacacagcgccttacatctcgcagccaagaacagccaccatgaatgcatcaggaggctgcttcagtctaaatgcccagccgaaagtgtcgacagctctgggaaaacagctttacattatgcagcggctcagggctgccttcaagctgtgcagattctctgcgaacacaagagccccataaacctcaaagatttggatgggaatataccgctgcttcttgctgtacaaaatggtcacagtgagatctgtcactttctcctggatcatggagcagatgtcaattccaggaacaaaagtggaagaactgctctcatgctggcctgtgagattggcagctctaacgctgtggaagccttaattaaaaagggtgcagacctaaaccttgtagattctcttggatacaatgccttacattattccaaactctcagaaaatgcaggaattcaaagccttctattatcaaaaatctctcaggatgctgatttaaagaccccaacaaaaccaaagcagcatgaccaagtctctaaaataagctcagaaagaagtggaactccaaaaacacgcaaagctccaccacctcctatcagtcctacccagttgagtgatgtctcttccccaagatcaataacttcgactccactatcgggaaaggaatcggtattttttgctgaaccacccttcaaggctgagatcagttctatacgagaaaacaaagacagactaagtgacagtactacaggtgctgatagcttattggatataagttctgaagctgaccaacaagatcttctctctctattgcaagcaaaagttgcttcccttaccttacacaataaggagttacaagataaattacaggccaaatcacccaaggaggcggaagcagacctaagctttgactcataccattccacccaaactgacttgggcccatccctgggaaaacctggtgaaacctctcccccagactccaaatcatctccatctgtcttaatacattctttaggtaaatccactactgacaatgatgtcagaattcagcaactgcaagagattttgcaagatctacagaagagattagagagctctgaagcagagagaaaacagctacaggtcgaactccaatcccgaagggcagaactggtatgcttaaacaacactgagatttcagagaacagctctgacctcagccagaaacttaaagaaactcagagcaaatacgaggaggctatgaaagaagtccttagtgtgcagaagcagatgaaactcggtcttgtctcacctgaaagcatggataattattcacatttccacgagctgagggtcacggaagaggaaataaatgtgctaaagcaggatctgcagaatgcattagaagaaagtgaaagaaataaagagaaagtgagagagttagaggaaaaactggtagagagggagaaaggtacagtgattaagccacctgtggaagagtacgaggaaatgaaaagttcatattgctctgttattgagaatatgaataaggagaaagcatttttgtttgagaaataccaagaagcccaagaagaaatcatgaaattaaaagacacactaaaaagtcagatgacacaggaagccagtgatgaagctgaggacatgaaagaagccatgaataggatgatagatgaactcaataaacaggtgagcgagctgtcacagctgtacaaagaagcccaggctgagctggaggattacaggaagaggaaatctctagaggatgtcacagctgaatatatccataaagcagagcatgagaaactgatgcaattgacaaacgtgtccagggctaaagcagaagatgcactgtctgaaatgaagtctcagtattcaaaagtgttgaatgagttgacccagctcaaacaactggtggatgcacaaaaagagaactctgtctctatcacagaacatttgcaagtgataaccacgctgcggactgcagcaaaagagatggaagaaaaaataagcaatcttaaggaacaccttgcaagcaaggaagtggaagtagcaaagctggagaaacaactcttagaagagaaagctgctatgactgatgcaatggtacctcggtcttcctatgaaaaactccagtcatccttagagagtgaagtgagtgtgttggcatcgaaattaaaggaatctgtgaaagagaaagagaaggtccattcagaggttgtccagattagaagtgaggtctcacaggtgaaaagagaaaaggaaaatattcagactctcttgaaatccaaagagcaagaagtaaatgaacttctgcaaaaattccagcaagctcaggaagaacttgcagaaatgaaaagatacgctgagagctcttcaaaactggaggaagataaagataaaaagataaatgagatgtcgaaggaagtcaccaaattgaaggaggccttgaacagcctctcccagctctcctactcaacaagctcatccaaaaggcagagtcagcagctggaggcgctgcagcagcaagtcaaacagctccagaaccagctggcggaatgcaagaaacaacaccaggaggtcatatcagtttacagaatgcatcttctgtatgctgtgcagggccagatggatgaagatgtccagaaagtactgaagcaaatccttaccatgtgtaaaaaccagtctcaaaagaagtaaagtggattccttggcaggacactgccccttgtcatctgtctttgtgttagatccagagttgtcggcagccgctgccattgttctcattcgtggtatgcactgtggcctagcgtagcttcttccctttccaaaggtttctgaggacttctcccaggagaagactgcccgcctcagaactgcttagagacttcaaaccagcagaggtgaaagtccctgtcatcccttcagattccagagctgggatcagccatgcccagaggtctggtcctgatgctggcaggggggccccctcctccatccctgactggctgagtggctttatcaccaccgagtgatgtgctgaggcctcctgcagtgaatgctccttccattcctgtactcgggcagtgccattcagcacaggagagctctttttgcctttggctttcaattccaaaacatgatttaatttctaactaaattagtatggcactagttatgaagtatctgcttaaaacccttcatcatgatatcctgtggatttaaaaactctaattccatgttttcttcccatctgccttatatatctcatcaccctgcttatcaatattcagtttgatgagcactattaactaaaatatgaaacttaaaaacaaaagcaagttgtccttaaaagttctttttttaagtaaattgttgacatactgcaaattttctatgcaaacttgcctcctgctgttatctgtgaagctcaggaaatccaaacatttgtgtttcaacaagggacagtaaactgtgtgtttacagccaaaagaaatgcctcatagttcttaacctcaacttttgtagaagtatttttttctctgtaatatttttattggctcataaagatgttttcatatctgaactcctaaataagtgaaattacagtagattatattaacaaaatactttttaggtagccatgcttgagactttttaaaaatataactttttccttaaagttttcagctatagcaaaaggtagttatgtatgccagacctaatatgagctgccaccaacacccctagaactttcagccatggtgtcttcagaattgtagcgcatttctgaatctagcaaatcctccttttacccgttgaatgttttgaatgccctgactctaccagcgcccataaatgatctctagaaggactgttagtaccaatctgtttttcaactttgaagctaaaaaccctgatatggtaatattatggtgcatagcagaggtctcggaaaaaaaatatttctgttcactttactttcaggttaaaaatgtttctaacacgcttgcaacttcccttatggcattaatcttgttgagggagagagacagaatcctggactctccaaagtatttaactgaaagtagggcctgctctgacagggcccatgtcccacaaggctgcttggcctcagtgggtgcttggctgtgctggatgatatgttgatctgtattggataaggaccaatgacagcaaagcaaaaatggctttaaagcttggtgttacttttcttaagttgtttaattatagttaagcaatttcaaaaatgctccaaagaaatgtgaaaggaccttttgtcacagcacttcagaaaatacacaacagccccttctgcccccgcacagaaatgctgcagagtatataaaacttgagacatttttgtaggatgcctgacgaggtgtagccttttatcttgtttccggatgcatatttattacgagtactctggttaaatattgaaaagttatatgctgtagtttttagtattttgtctttgtaatttacagaagttattggagaaaataaacttgtttcattttgcaaaaaaaaaaaaaaaaaaaaaaaaa

SEQ ID NO: 5 - DNA, 5043 bp, Homo sapiens
  Genbank Accession No. AB037755
ggagttgggaggctcccggcgcggggtcccgggctcgtgtccccgcctttgtgtctggagctcgggcgcgggaggcgctggggacggcgcccgggcggagcggctgagcgggctgcagccggggtcccgccacctctccctggtccaccgccggcagcccactgtctgcggagagcagatctggggacaagaggaaggagaggaaggtgttgaaaagtctcctctagagctttggaaggctgaatgcactaaacatgaagagcttgaaagcgaagttcaggaagagtgacaccaatgagtggaacaagaatgatgaccggctactgcaggccgtggagaatggagatgcggagaaggtggcctcactgctcggcaagaagggggccagtgccaccaaacacgacagtgagggcaagaccgctttccatcttgctgctgcaaaaggacacgtggaatgcctcagggtcatgattacacatggtgtggatgtgacagcccaagatactaccggacacagcgccttacatctcgcagccaagaacagccaccatgaatgcatcaggaagctgcttcagtctaaatgcccagccgaaagtgttgacagctctgggaaaacagctttacattatgcagcggctcagggctgccttcaagctgtgcagattctctgcgaacacaagagccccataaacctcaaagatttggatgggaatataccgctgctgcttgctgtacaaaatggtcacagtgagatctgtcactttctcctggatcatggagcagatgtcaattccaggaacaaaagtggaagaactgctctcatgctggcctgtgagattggcagctctaacgctgtggaagccttaattaaaaagggtgcagacctaaaccttgtagattctcttggatacaatgccttacattattccaaactctcagaaaatgcaggaattcaaagccttctattatcaaaaatctctcaggatgctgatttaaagaccccaacaaaaccaaagcagcatgaccaagtctctaaaataagctcagaaagaagtggaactccaaaaaaacgcaaagctccaccacctcctatcagtcctacccagttgagtgatgtctcttccccaagatcaataacttcgactccactatcgggaaaggaatcggtattttttgctgaaccacccttcaaggctgagatcagttctatacgagaaaacaaagacagactaagtgacagtactacaggtgctgatagcttattggatataagttctgaagctgaccaacaagatcttctctctctattgcaagcaaaagttgcttcccttaccttacacaataaggagttacaagataaattacaggccaaatcacccaaggaggcggaagcagacctaagctttgactcataccattccacccaaactgacttgggcccatccctgggaaaacctggtgaaacctctcccccagactccaaatcatctccatctgtcttaatacattctttaggtaaatccactactgacaatgatgtcagaattcagcaactgcaagagattttgcaagatctacagaagagattagagagctctgaagcagagagaaaacagctacaggtcgaactccaatcccgaagggcagaactggtatgcttaaacaacactgagatttcagagaacagctctgacctcagccagaaacttaaagaaactcagagcaaatacgaggaggctatgaaagaagtccttagtgtgcagaagcagatgaaactcggtcttgtctcacctgaaagcatggataattattcacatttccacgagctgagggtcacggaagaggaaataaatgtgctaaagcaggatctgcagaatgcattagaagaaagtgaaagaaataaagagaaagtgagagagttagaggaaaaactggtagagagggagaaaggtacagtgattaagccacctgtggaagagtacgaggaaatgaaaagttcatattgctctgttattgagaatatgaataaggagaaagcatttttgtttgagaaataccaagaagcccaagaagaaatcatgaaattaaaagacacactaaaaagtcagatgacacaggaagccagtgatgaagctgaggacatgaaagaagccatgaataggatgatagatgaactcaataaacaggtgagcgagctgtcacagctgtacaaagaagcccaggctgagctggaggattacaggaagaggaaatctctagaggatgtcacagctgaatatatccataaagcagagcatgagaaactgatgcaattgacaaacgtgtccagggctaaagcagaagatgcactgtctgaaatgaagtctcagtattcaaaagtgttgaatgagttgacccagctcaaacaactggtggatgcacaaaaagagaactctgtctctatcacagaacatttgcaagtgataaccacgctgcggactgcagcaaaagagatggaagaaaaaataagcaatcttaaggaacaccttgcaagcaaggaagtggaagtagcaaagctggagaaacaactcttagaagagaaagctgctatgactgatgcaatggtacctcggtcttcctatgaaaaactccagtcatccttagagagtgaagtgagtgtgttggcatcgaaattaaaggaatctgtgaaagagaaagagaaggtccattcagaggttgtccagattagaagtgaggtctcacaggtgaaaagagaaaaggaaaatattcagactctcttgaaatccaaagagcaagaagtaaatgaacttctgcaaaaattccagcaagctcaggaagaacttgcagaaatgaaaagatactctgagagctcttcaaaactggaggaagataaagataaaaagataaatgagatgtcgaaggaagtcaccaaattgaaggaggccttgaacagcctctcccagctctcctactcaacaagctcatccaaaaggcagagtcagcagctggaggcgctgcagcagcaagtcaaacagctccagaaccagctggcggaatgcaagaaacaacaccaggaggtcatatcagtttacagaatgcatcttctgtatgctgtgcagggccagatggatgaagatgtccagaaagtactgaagcaaatccttaccatgtgtaaaaaccagtctcaaaagaagtaaagtggattccttggcaggacactgccccttgtcatctgtctttgtgttagatccagagttgtcggcagccgctgccattgttctcattcgtggtatgcactgtggcctagcgtagcttcttccctttccaaaggtttctgaggacttctcccaggagaagactgcccgcctcagaactgcttagagacttcaaaccagcagaggtgaaagtccctgtcatcccttcagattccagagctgggatcagccatgcccagaggtctggtcctgatgctggcaggggggccccctcctccatccctgactggctgagtggctttatcaccaccgagtgatgtgctgaggcctcctgcagtgaatgctccttccattcctgtactcaggcagtgccattcagcacaggagagctctttttgcctttggctttcaattccaaaacatgatttaatttctaactaaattagtatggcactagttatgaagtatctgcttaaaacccttcatcatgatatcctgtggatttaaaaactctaattccatgttttcttcccatctgccttatatatctcatcaccctgcttatcaatattcagtttgatgagcactattaactaaaatatgaaacttaaaaacaaaagcaagttgtccttaaaagttctttttttaagtaaattgttgacatactgcaaatttcctatgcaaacttgcctcctgctgttatctgtgaagctcaggaaatccaaacatttgtgtttcaacaagggacagtaaactgtgtgtttacagccaaaagaaatgcctcatagttcttaacctcaacttttgtagaagtatttttttctctgtaatatttttattggctcataaagatgttttcatatctgaactcctaaataagtgaaattacagtagattatattaacaaaatactttttaggtagccatgcttgagactttttaaaaatataactttttccttaaagttttcagctatagcaaaaggtagttatgtatgccagacctaatatgagctgccaccaacacccctagaactttcagccatggtgtcttcagaattgtagcgcatttctgaatctagcaaatcctccttttacccgttgaatgttttgaatgccctgactctaccagcgcccataaatgatctctagaaggactgttagtaccaacctgtttttcaactttgaagctaaaaaccctgatatggtaatattatggtgcatagcagaggtctcggaaaaaaaatatttctgttcactttactttcaggttaaaaatgtttctaacacgcttgcaacttcccttatggcattaatcttgttgagggagagagacagaatcctggactctccaaagtatttaactgaaagtagggcctgctctgacagggcccatgtcccacaaggctgcttggcctcagtgggtgcttggctgtgctggatgatatgttgatctgtattggataaggaccaatgacagcaaagcaaaaatggctttaaagcttggtgttacttttcttaagttgtttaattatagttaagcaatttcaaaaatgctccaaagaaatgtgaaaggaccttttgtcacagcacttcagaaaatacacaacagccccttctgcccccgcacagaaatgctgcagagtatataaaacttgagacatttttgtaggatgcctgacgaggtgtagccttttatcttgtttccggatgcatatttattacgagtactctggttaaatattgaaaagttatatgctgtagtttttagtattttgtctttgtaatttacagaagttattggagaaaataaacttgtttcattttgc

SEQ ID NO: 6 - DNA, 1860 bp, Homo sapiens
  Genbank Accession No. AF153606
gcggatcctcacacgactgtgatccgattctttccagcggcttctgcaaccaagcgggtcttacccccggtcctccgcgtctccagtcctcgcacctggaaccccaacgtccccgagagtccccgaatccccgctcccaggctacctaagaggatgagcggtgctccgacggccggggcagccctgatgctctgcgccgccaccgccgtgctactgagcgctcagggcggacccgtgcagtccaagtcgccgcgctttgcgtcctgggacgagatgaatgtcctggcgcacggactcctgcagctcggccaggggtgcgcgaacaccggagcgcacccgcagtcagctgagcgcgctggagcgcgcctgagcgcgtgcgggtccgcctgtcagggaaccgaggggtccaccgacctcccgttagcccctgagagccgggtggaccctgaggtccttcacagcctgcagacacaactcaaggctcagaacagcaggatccagcaactcttccacaaggtggcccagcagcagcggcacctggagaagcagcacctgcgaattcagcatctgcaaagccagtttggcctcctggaccacaagcacctagaccatgaggtggccaagcctgcccgaagaaagaggctgcccgagatggcccagccagttgacccggctcacaatgtcagccgcctgcaccggctgcccagggattgccaggagctgttccaggttggggagaggcagagtggactatttgaaatccagcctcaggggtctccgccatttttggtgaactgcaagatgacctcagatggaggctggacagtaattcagaggcgccacgatggctcagtggacttcaaccggccctgggaagcctacaaggcggggtttggggatccccacggcgagttctggctgggtctggagaaggtgcatagcatcacgggggaccgcaacagccgcctggccgtgcagctgcgggactgggatggcaacgccgagttgctgcagttctccgtgcacctgggtggcgaggacacggcctatagcctgcagctcactgcacccgtggccggccagctgggcgccaccaccgtcccacccagcggcctctccgtacccttctccacttgggaccaggatcacgacctccgcagggacaagaactgcgccaagagcctctctggaggctggtggtttggcacctgcagccattccaacctcaacggccagtacttccgctccatcccacagcagcggcagaagcttaagaagggaatcttctggaagacctggcggggccgctactacccgctgcaggccaccaccatgttgatccagcccatggcagcagaggcagcctcctagcgtcctggctgggcctggtcccaggcccacgaaagacggtgactcttggctctgcccgaggatgtggccaagaccacgactggagaagccccctttctgagtgcaggggggctgcatgcgttgcctcctgagatcgaggctgcaggatatgctcagactctagaggcgtggaccaaggggcatggagcttcactccttgctggccagggagttggggactcagagggaccacttggggccagccagactggcctcaatggcggactcagtcacattgactgacggggaccagggcttgtgtgggtcgagagcgccctcatggtgctggtgctgttgtgtgtaggtcccctggggacacaagcaggcgccaatggtatctgggcggagctcacagagttcttggaataaaagcaacctcagaacaaaaaaaaaaaaaaaaaagcggagctcacagagttcttggaataaaagcaacctcagaacaaaaaa

SEQ ID NO: 7 - DNA, 1413 bp, Homo sapiens
  Genbank Accession No. AF169312
tcgcacctggaaccccaacgtccccgagagtccccgaatccccgctcccaggctacctaagaggatgagcggtgctccgacggccggggcagccctgatgctctgcgccgccaccgccgtgctactgagcgctcagggcggacccgtgcagtccaagtcgccgcgctttgcgtcctgggacgagatgaatgtcctggcgcacggactcctgcagctcggccaggggctgcgcgaacacgcggagcgcacccgcagtcagctgagcgcgctggagcggcgcctgagcgcgtgcgggtccgcctgtcagggaaccgaggggtccaccgacctcccgttagcccctgagagccgggtggaccctgaggtccttcacagcctgcagacacaactcaaggctcagaacagcaggatccagcaactcttccacaaggtggcccagcagcagcggcacctggagaagcagcacctgcgaattcagcatctgcaaagccagtttggcctcctggaccacaagcacctagaccatgaggtggccaagcctgcccgaagaaagaggctgcccgagatggcccagccagttgacccgcctcacaatgtcagccgcctgcaccggctgcccagggattgccaggagctgttccaggttggggagaggcagagtggactatttgaaatccagcctcaggggtctccgccatttttggtgaactgcaagatgacctcagatggaggctggacagtaattcagaggcgccacgatggctcagtggacttcaaccggccctgggaagcctacaaggcggggtttggggatccccacggcgagttctggctgggtctggagaaggtgcatagcatcatgggggaccgcaacagccgcctggccgtgcagctgcgggactgggatggcaacgccgagttgctgcagttctccgtgcacctgggtggcgaggacacggcctatagcctgcagttcactgcacccgtggccggccagctgggcgccaccaccgtcccacccagcggcctctccgtacccttctccacttgggaccaggatcacgacctccgcagggacaagaactgcgccaagagcctctctggaggctggtggtttggcacctgcagccattccaacctcaacggccagtacttccgctccatcccacagcagcggcagaagcttaagaagggaatcttctggaagacctggcggggccgctactactcgctgcaggccaccaccatgttgatccagcccatggcagcagaggcagcctcctagcgtcctggctgggcctggtcccaggcccacgaaagacggtgactcttggctctgcccgaggatgtggccgttccctgcctgggcaggggctccaaggaggggccatctggaaacttgtggacagagaa

SEQ ID NO: 8 - DNA, 83946 bp, Homo sapiens
  Genbank Accession No. AL078459
gatcctgaccacaggtaagagtaactcttagttagctccaaatgagaatctgaacccgccccatctctggggagacagctggctggcttcattctctccctcactgatgggtctattcatctctgggtcaccaaatatttactgagcaccaactatgtgtcaaacatcatacttagcactggggatgcagtgacctacttggctcctaactctaggagctcactgtcctctataaaggacatagatgtataatgagacaactactatatggcttggtgcaatctcggctcactgcaacctccgcctcccggattcaagtgatccacctgcctcagcctcccaactaactgagattacaagtgtgcaccaccatggccggctgctttttgcatttttagtagagacagggtttcgccatgttgctaggctggtctcgaactcctgacctcaagtgatccacctgccttggcctcccaaagtgctgagattacaggcatgagccactgtgcctggcctgtattttctttatattggacccaggtatgtgcatttgttcatttgtccatttttgcagttttaaaacatcctgagcacttaccatttcctgtgttagttcttgtgctagataccaggatcttgtgctagaaaaggctgtttctgccctcagcctctactgtctagtgggagagcagcctggcacaagcaaccagaaggtagcgtggccgacaggtgctgctactgccaaatgggagggcaattgcatgtgtgcacttgactgggccatggggtgcccagatacttgattaaggtgattttgtgtgtgtctatgagggtgtttctggttaagatcacctgtgaatgagtggactgaggaaaacagagccctcccactcccagtgtgagtggactttattgtctgttgaaggcctgaatagactgagaggctgagtaaggatggattttctttctctgcctggctgcctttgggctgagacattggtcttcctctgcaatcagatttgaactggaacttacaccatcatctctcctggatctgcagtgtgttgacggcagatctgggacttgtcaacctctataatcccatgagccaattccttatattaagtcatatatattgcatatatagtaattcatatatatgagatatatattttttctattggttctggttctgtttctctggagaactcagagtaatacactaagcaatggtgggagtccgtgggagccctgaaatgtcttgcgaattgaacaagagtgcacttgcaaattctttacgcatttgaagcctagactagggcaatgaggactgagtaagactgcagaagggtctagctggcctcctccccacccctctcctctctcctcctctgtcctctgcttccctcccttcctttctccttccctcctctcccctcacttcccctcgcttcccttcccttgtcctcccctccccattgccgttcctccctttcttctccctttctctccccttgccttccatgcctactgtaggctctcattattcttagattctttcttttcccctgaaacacctgctaccaggtaagggtcagatgaacgtatttcacactaagatataaataactaattagagtgttgctacccatacctcaaccctagagcttggtgatttttttttttccaaaaagggaacaatcccttagctaaagagccgctgctccaggggaggaaacgtaggcttgggcccagagataggtggcagcaggggtttctggccacgaagccttcaggccttcccaggtcccagcgtgtgtggatcttaaaacaccccctgccaagggctttgattccaattttggtttcagctaattggtttcagctgaggtgggagaggccacgcctcaggatctgcctaggccaggactgggaatgggtctcccaggtgactccgcgggcccataggcaggcagatcctgggaagacgccctttactcagtaaggagggcccaggcgtccaaagcccaccagggggcagcggcggcattcttagccccacttctccgcgctcaaaggccggctgagaaaacgcgagtgactacccgagggcgctgttactccacaatttttctgcaaaagctaaggtcggcaaacatggatattcggatttccattgtttttgaggctaaatcaaaagatgcctctggggaaaaggggcaacatgcactgtcggatcggcattcatatggaaaaacagaggtaggaaacattttatacattttgaagatactttgatgtgcagtaattttgaaactttcgtagggcacctgtttttcaatgggcggtgtagagtaatgctgccaaacacagagtttgagccctagtaccacacccactagcggtgtgacttttcctggtgactgagtctctctgggcctcagttttgcataggggacttgttccgcccctccttgtcctaggtgtaaatgctgcgttggtgttgcactcataggctcacctggccaaggaccagcttctgtctatattactctcaaacttgccacttggagcatatttcattctcatcccctttgccttcacactgctattcaccccagttcagaagggcagagcaatggccaaaatgtaagactggggttgggactgtgagaagaaaggaacaattgccagttagcaaattattataatggccacgtgggctccagggctgacataatgaggagcttggtatgtgtggtaattacacacacttgagttgagtcttaggaaaacatataaaagaaacgttattttctttttttctaaaggctatgaaggtaagaagcattccataagcaattattatgcagcactatttcaagggttgggctctgtcaatgagttttaaccactaaagaaaaggaattctaattgggggcgaaggtagttttaggaatggcagcttcggagttttgtactgacaggtgctggtgaaaagctgattaatcccattcaatactataataggctacatttgtatagcactgcatagagtaccaagtacttttatataaatcctctcatttgatgttcccaaccaccctttgagatatgaagaggacaaagagaattattgctgtcattttaaaaaccagctttattgagatataattcatataccaaacacttcacccatttaaaatgtgcaattcaatgattttatgcacgttcacagatatatgcaacgataaccacatcaattttcatcaccacaaaaagaaccctctacccttagttatcactcccttttcctccctctcctccctccttgcaccctcccctccaaagcaatcactattctattttctgtctctacagatttacttatcctggacatttcatataatatgtggtcttttgtgactggcttctttcacttagcataatgttttcaaggtttattcatgttgaagcatgttcagtacttcattcctttttacacctgaataatatcccgttgtatggatatttttgttcatctcttcatcagttggcatccatttcatttatccattcattagttggtatacacgggttgtttgcaccctttggttattttaaataattgctgtaaacattcatgtacaagccttggtgggggcatatgctttcatttctcttaggtatattccagggagtggaattgctggatcatatggtaactcaatgtgtaggtgtttgaggaactgccagagtgttttccacagtggctacatttgacattctcattaggagggtatgatttctccacctccttaccaatgtttgctattacctgactctgattctagccattctagtgggtatgacgtgatatctcattgtgattttgatgtgcacatccccgatgactgatgatgtcaaacatctttctcatgtggctgttggccatttgtatatcttctttggaaaaatgtctctgatcctttgcctgttttcaaactgtcttttctattatcaagctgtaagagttcattatgtattttagatagaagtcccttatcagatatataatttgcaaatgttttctctggttcagtgggttatcttttcagttgtttgttttttaagagatgggatctcactttgtcacccaggctggagtgcaatggtgagatcatagcttactgcagcctcgaactcctgggctcaagggatcctcctgcctcaccctcccgagaagctgagactataggtgtgcactaccgtgcctgtctttccttttcttgacagtgtcttttgaagcacaagttttaaattttgatgttgttcaatttagtttttcttttgttgcttgtgcttttggtgtcatatgtaagtggcaattctgaggttatgaaaatttatcactaagttttcttctgagttttatattttagctcttatatttaggtctttgattcattttgagttactttttgtatatggtgtgaagaaaggatccaacttcattcattcttttgctggatatgtgggtatccagttgtcccagcagcagttgagaagactgtcctttcccctctgaatagtcgtggtacccttgttgaaaatcagttgaccatagagacatggacttatttctggactttcaattctattccattcatctatatgtttatctttacgccagtactgcatggtcttgattactgttgcttttaaagttttgaaattgggagtgcgagtcccccaagcttattcttcttttcaatattgttttggctatttgaggccccttgtaattccatgtgaaatttagaatcagcctgtcagtttctacaaagcagccagctgggattctaattgggcttgcatttaatcggtttatcaacttgaggagtgttgtcatcctaacaatattaagtcttctaatacatgaacataagcagtttttccatctatttagatatttaacttctttcaacaatgttttgtaattatcggagaataagttttggacttttactaaatttattgctaagtgttttattctttcggatgcaattataaatggaattgttttcttaatcttatttttggatttgttcactgcaaatgtgtagaaacacaatttttaatatattgatcttttatcttaaaatcttgctgaattctttttttttttttttgagatgaggtctcactctgtcacccagattggagtgcagtggtgtgatctcggctcactgcaacctctgcctcttgggctgaagccatcctcccacctcagccccccaaatagcttggaccacaggcgtgcgccatcatgccaggctaattttttgtatttttagtagagatggggtttcactatgttgcccaggctggtctcgaaacctgagctcagatgatccgctcacctcggcctcccaaagtgctgggattataggcgtgagccaccgtgcccagcctcatttattaattttaatatatttttagtggatttcttaggattttccatatagacaagcatgttaaatagagatagttttacctcttcctctctgatctggatgcctacaatttagcctttacctccaaggaatctaccaatttcctctctattgcctttcaccacaaccacaactgtttttgagagcacacttagacttgaacttcacactctgttgcaaatgaagtcagttctctagggagggattcagagctcttccttccacggcctgattgtgcccctggggaaaatctctgagccatcctctgcgggattgagggcagggaaaatatggttcacttctctctgaatgacaaccttgtttttgtttctcagtgccaggtagagaggaggcaacagactcaggtctttttggtttgcttctctgggttagaactcctgccccatgagccaaggcaaggacattcaggctccctgtatcatattggtaccatgctctcagagtggagcctctgtcccctgagagttcgggcttggaggaagaaaagagaccctcctggcaacactcacccagaacttagtctcagcattaggtcatgagtgggaatggcaggataagcaatgctgacatcctgtctctccccaggaagactgactttcaattaggatctgtggagaaaaggagccttgtgttcttagctctaccctaaggtgtggagcttctgcctcactgagctgtgagcggggaggaagggtgtgggtcttgggtcaaaatcactgattcactgatcttaccaagttttaatagattttcttgaataaatgtttcttcatttgctatgtacatttatgaccatttccagagactttaaatatttatttatttttattattatactttaagttctggggtacatgtgcagaatgtgcaggtttgttacataggtatacgtgtgccatggtggtttgctgcacccatcaacctgtcatctacattgggtctttctcctaatgctgtccttcccccaccccccgacccaacaggccctggtatgtgatgttcccctccctgtgtccatgtgttttcattgttcaacttccacttatgtgtgagaacatgtggtgtttggttttctgtttttgtgttagtttgttgagaatgatggtttccagcttcatccatgtccctgcaaaggacatgaattcatcctgttttatggccacatagtattccatggtgtgtatgtgccacattttctttatctagtctatcattgatgggcatttgggttggttccaagtctttgctattgtgaatagtgccgcgataagcatatgtgtgcatgtgtctttatagtagaatgatttataattctttgggtatatacccagtaatgggatggctgggtcaaatggtatttctagttctagatccttgaggaattgccagtttcacttgggagtgaatccatagacctcttcatgctaccatattgaagctgtaacccttactactgtcatttagtagatgctgtgatttgaatgtgttccccaaaggtttaagcattggaaacttaatcattaaaacaacagtgtttggaagtgaggcctaagaagaagtgattgggtcatgagggtggtgccttcacaaatgcattaatgtcattgtcatgggagtgggttagttatcatgggaatgggtagttataaggtaagcctgatccctagtgcctctgtcttgtgcacttgcttccgccttccaccatgggatgaaccttgttagatgctggtaccatgctctaggacttcccagatccagaatcatgagccaaataaacttctattgtttatcatttacccagtgtgtggtattctgttataagccacagaaaatgaactaaaacactagatgagggcaatgttcatctatttgggagactaggggtagtagaggggaaacgaaagtcacccagaatcagaatatagtacaaaggcctactaaaagattccagggtgggaaaggaataccttggtatggatgttaagtatatcagatgttagtggatagaaggaccactcctgcacatggtccttcaaatgctacttgaacaccccaggaaaggggaattcactactattagtttagactgactattatccccataagcaatatgaccaagtaaaaccaaaacagctgtgcctgccaagatgagcaggatgtacaaacaaaaggaaacagaaaagaggtacttcaggatcctaaacaactttatgttaccagaaggtcatgggcatgctacaaaaaggcaactagctgttttgggataccaggtgcccaagagactgctctaattttagaaataacacagtgcttactaaagaggtccaggactcatgggtctggaatgcaacgttcttccaccctcaggccgtgcatactcatgttctggtgttgattctgctccaattattttctgatgttgagggagggaggaccagaccacagaactggcatgtgcctaaggaatctgccaagagttattaaatgataactgaaataataaattatttaaatttacagagacttgtaaatttacagagttggttatgaccactgtctgataggctaagagctcattttcacagtggccttgtgctgatatcctctgactctccagatccatcctctgcccttctctgccagttctctgccctagaacgctgacctcctaggctggaggcatcccctgagcccccaactgcatcttgtggttgtgttcagccaatggggagcaccagcagatcagagttaggagagaaagaggttaaggtacttcttctctgctctctggctgggtctgtggccctgccttctctgtcttatattttgcagcacaattttctgtccttgtcctgctgggcctaggagtgctgctgacatctgttttccgggtgtcttaccaccccttgtttttacccttaacacccatacttctgaaacagaccttcattaaggtcatctctttatttgaaccaagtgggaatgaattatatttcctaacagactccttgatactattatatcttgccctgctaacaacattccttctgtctctcccaattattatcaagcctggaaagaagcaaaccccatgttactgtcttagcattaactctaggggacctcataccctcatctgggtcccctgtaaacaaaatgatgactttgctcacatccttccctggaattttaagcctctgtggccctgtgaatcagtatttattccactagctccttttacacagctagactgttgcttgaaatcagaacttgtttggttcctgagcttttcctccatcaatgtgaaatatgcagtctttgtaccctggtgggatagaggcacattcaacctatagcatatagggtcctagtttaattttgaatggtcatcctctgagttcttacctcaaagccttagctaataaataagctttcttgtccatgagcaggaatttaaagttcctgcttttaaagtgcttttaaagtgagaaatggggagatgccaaagggcagaaagtttcagttttcaagatagaaaaatgctggagatcaaatgtattgcaatgtgattatagttaacaatattctattacatacttgaaatttgctaaaaggaaagattttaaatatttatcaccaaaaaaaaagaaaaaaaaagaaagtgataactctgttaggtgaaggctatgttaattgacttgactgtgattatttcacaatgtctttctaagcatcaagttgtacaccttaaatatataccatttttatttgtcaattagacttcaataaagttggggcagcaagctacctccttaggcctgtgttaattcactcaagctctttctcagtattcatagccaaaatgactaaactttccatttataaatagagggggcctcccaagacctagagacccatcattgcttttaggcattcatgtcacacgccagctcaggcaatattttaccaagttcatacttgtttgaatcttttatttatttatagtgacagtaatatatttggcacttacccgtcctcctaaaagcctgataaccccagttatcttgtgctataagtggcctagctttcactaacttagaaatgagggtttggagggggaagggagacagggaacattccgattagccaacagtttcctaatgcaagtatgtctgtggcacagccatgtcagctaccagggaaacctgtgaattcaccacggaagccgtcaggccagcttagaggcatccgtgatgaaaatcccgagttatttctggagtaggtgattgacgtttcaaatagaagatgacattttaatgggatctaagcttgctgtgatcggagttaataagtataatgatgatgataatgatatttacattatctctttcatccaaagaacccttcagttcttttatcgcatttgccttgaaaatgtcccttcggagttgggaggggaaggtgttattaatctgttcttcaggaaagaaaatataaagagacttaattgccaggctttcaggctccattttggtggtaagaagagatatttaaataacaaattaaacttggagaaattaagcttggcgaaacaccagtctttctcagttcccagtcatcctatataatgctgccagatcaagctccaataatatcacttcttgactgaaaagtcttcaggggatcctggcagactgccaatttcagtccaaatatcctaactcagcaggcaaggccctcaatgttccaaccaatgttgtctcaccatgctcttacacttaccctgtgtttcagccaaataaatccgcttgcttgaccctatggtctgctctaagcaccccattctcctttaataatgttcattccccttgccctaacttgttcaatgtcagtcttccctgttgcatgtacattccaggagggtagggactgtcaccactgtatcctcagggcctagcaaagttaactggcatgtaacaggggctcaaatacttgcttctgaagtgaacacgatgctctcccacctccatgcctttgcttctgcggctccctcagcctagacaacctgtagtcccatctcaacctattgaagccagagctgtccttccaagcccagattaaaccccaattcctatgtctggtctccctgacttgggaacagacacggcattgttcttttgtagttcgtacattctgctgtatcataatcatttgtgtaattgtgtagtcgtccttccctgcctctcccaaaccatcagttctggaaagatcggagctgtactccagagcctggcagagtacgggcacttgttaaacacgtgctcactcgtctaaaatcgttgatgaccagcattcttcagtgagcagaattcccacttccagaatctatagcttgctacggagggtatttttctgtttcctctccccttattctttcagaggtggggaggaaggtcagtcagggaacccctgccaactcttcctttaagaagtatctccctttctcctctggaggagcagtatatctggcactgaggtggagggctccatttccgactgggacccacagtaggtttgcaaggtggcatttggcattttttagcatcattgccagtgacaatctaaataatgcagagataatcaatgcaacaccaactgagaaggtgtgattaaatcaatgacatccccaaggaattttagaactggtctttgcatctgatgagcattcacacagctcattcagttatgataaaaatatgccacatgaactagctctggggctgggtgaaagcttagaagcggtgcatttttgatagactgaagacccctggctaatagcaatgtgggcatattgactatctgtgacataacactatgtataatttagaacgagctgcttgaataaccgtgttgtagaatattcagggctgttaaaactgatgatgtagatctacatttgttgagatggaaagcggccaacaatattgctaagtcgaaggaagcagactacagaacagcatgattatgtaaaattattgcatatttatactgctatctatttacagatctgtgattattctctgaaatgttaataatagttatctctgggtgataaaattgtggggtagtttttaaatttacttagttttttgtgttgcttggattttaacagtaagcagttatttttacaatcattgaaagaaaacaatacagattgaaaaaacttgttgaaaaaagcctcatttaaaaaaaccttcaaatttgctaaaagatgcttactatataacaaaaacaaactcttgtatgaatgagcaaataaaaaaatcatttacctgcctccataactgaaccacataactgactatgtgctgaatatggttaacagtgaaagggatgaagggacgccgttttgaggagaggcacaggggaactcaagctctcctgacctggtgtacatactatgcacactttttaagtgcctgaagtatgaagtatcacttcaaatattattttaacccaagctttgatggcaattgatttacaggtatggtatttttctaagttcatagcctaagggacaagagagaaaatatcccatgactgacagcaaagaaatgatgacttcattccccatggcagtttctgttgcaaagaaaagagacatacactgttgatcacagtacaactcaacactttattccattgtgattggtatacatgtaagattgagacatcaagagactaaaaatcagtgcagaacttctctgaactaaagggccgtgaaaggcatgattggttttggcacacagagtggataaccatacattggctggaatgaggtggtcaggaaaataaaatgcacaaatctaacaccatgttgaaatcatgtctgagttctggagaaagttaaagtgtaaataattacaaagactgacatgcaactctttaccttacattattcatctacagactatttttctcccttagagatgaggagatggccttagtaatctgttcagagtagctgaaaagaccaatcaatacacattagaaagatctgcctgatttctatagcaattcattatagctgaagaaataatgctaaataatgtattttctctatatcatcctttaactaaattgaatcacatcacccaagtaattctgacttaacttttacttagttaaatataatttctcctgtcttttaatgtcaaaaagcagtttccgttagtttatccattggtgtatatcacaacagatgaggaaaacttatgtgatagtatctttccttttcaaaaataacattatgctaatgagaacatcaaagaagtaatactatgctgcaagtaatttaggttttcacatcatcaatcatatagggagtccaaagaagccagcctagcaggtaacatagcagagcagaatgcaatgtagaagaggcacacagagtctaagtgatttctccagacaaaagagaaggaaagacagaaagaagcaaaagaaaggaaaagtgaaaaacagccttctgcagaacaaattgttacaaagaaaaatctatttgcttgcaattgattaaacataatagagaagagttctttgatttgggatgatagaagtaaagatattaaaaattatatgctggtaagcctaaactggcagattgggccatttttcctgtggttgtatttgagatgttgagctctcacagggagaatttttgcttttgccaaggaagggccagatttaacccaaaaggacaaccttgagaacattttttctttgttaacttgggcatgtggctaacattcgttctctctctggtaaaaagatattattcatctctgatgagatggttcaaaatatgacagtgaccaagacgtggtttattcacaggatgcacataattggatatctgcatatggcatgaattaaaaagttaagcaacaaggaagagaaggaggagaaaaaaacttttgcaaatttctgacataaaataatcaaataaaagggaaagatagtggttaaggatgttttcattttctcagaggtttctccttccatctgctacgggggaaatgaaatgaatgaaagtaattctctttaggtcaccaacataaggaataatttgactgcaaacatagaagtgagcagagcaagatttgaagtgatacttcttaatctctttgattcttaatcttaaacaacaagccacaggcaatacaggaaaggtggagatgactaggaagtgtgataatgtgcctggatcagttaccattcattggaaagtaccgtttcccctgcctgttaataggctgattcctgcaggtttgagtaaaggaatcatctcttccttcagtgccgcattgttctttgtaagagatccgtgtcagttcaaagttgtgtaatttaaaggctagagaagaaagaagtttaaattggatcccacagtaaatattcacggatatttcaaagtagaattgtccactgtctggggttgggttcaagcatcaaggtgatcgcttcctgaacatgttcattgaccatgaggagctgtttactctggctcatattagactaccagtaattattttcagacatgatgtctcttttgaaagaaatgactttgctggactaggataactgcaggggtagaagactggaaatacggtgagtcagggtaggtggaaacagaaatgagtagaaggaaaaaaaaaaaagagttcctccaaggtcatatatggtcagtaatgaagcaaaaattcatggtatgtgacttaaagactttctaagacattgtacccatgggatgtttccaagcttcttgatctttaatcttttagcaaccttctgatactggatttaccttcctaggtgtggtgccctccttctggaatttagatctctggggcaaaccctgtcaggatgtgcctctgtgtagttaacactgccccagacagcagctctgatttcagtcacagttctgctgagaagcctgtctgcccctggcaggggtgaggggagggttgttggtggcagatgtagtcagaggcagaggagaccaatggcagacagggtggacctgcaggaaggtagccagaaggaaagaccttgggttttacccaaggtcaaggtggctgtgatagaagagcgaaaggcaaaagtaactaactgaatttcagaattcagaagtaaaagagaaaggaggaggatccctggaccagggactttcacaggaaccaaacatgattcatgaaaaaaaaaaaaaaaaaaagcaagcttatctgactgatcaagaagacattcttcagaatatactggcaactaaataattttcacaccaaaaatacagacactaaatgagtgtttccttactgggattaatcacattttgataattcattagctctgtatcttctaggttgcttaattcatttagcaaatccacagcttaggtaccacctcgaggggagggagggtgggggtgttgaatgaagcaattcaacttagaatcaaattttgtaaacaagagttagtagcacagtggcacagtagattgtcaaggaaaacaacaggagtgggcacagagtcatcggccttgcctgtgcggtcttgccggcaaccgggggggactctgcagctcaggagtctactttcttgttaattaaaactgagcagcaggtgagcagcccatccaccttttccagttcagacatgctcacggggatcagcatatggtccttcagtttctcataaacctacagtgggaatcaaggaaaaggaagaaaagaaggattatgttttaccatcctcagaagtggagaatcaatttgatttgtacatctaggcttttcattcatttaatcccaagacacacaggcagtctcaaccacacacatgcccacagtcatccctatagagctggtgggaactggttaaccactagccctgtgctttaacctcaaggccaaagatgtgtcagaaatgtggttttgctagagatgcctttactctgccattgtcattgctagattaagtggtacatggaagttggtgaccatgtgtcagtctgaatattactttctcttcacactttatttttatttatttatatatttttggagacagggtcttgctctgtcgtccaggttggtgtacagtggcgcgaccatggctcactgcagcctcaacttcccaggctcaagtgatcctcccacctcagcctcctaagtacctgggacaaacaacagatacacaccactatccctggctaatttttattttttattttctgtggagacagggtctcactattttgccagggctggtcttgggttcctgggctcaagtgatcatcctgccttggccttccaaagtgctggtattaaacaggcataagccaccacactaggccttctcttcacagtttaaaaccctctcaactatactttaggtttattttcttaccaacactgctggaaaaatttgacaagatataacttaagtatttcaggttaaactgcttttaaattacaggtatgaattttattagcatcttttgacactaatagaaagcatatgtcaaaacttcaattaacagttcatagattgttctgtgatgatcaaacaaagcatatttttaaaaacagaatcacttgaaagtgtactgcctaataacaatctcctgtgcttctttaggaagcactgcgtttcttaaaattcagcacagtggttaattaagagtgttggagccagagtagggtcccaaacccagttctgtcaacctactacttaaagaattatttcagtgaagtgacattccctctgagcctcggtttacttctctgtaatattggaatagtaatgttgcccccatagggctgttacaaggactgaataagataatacacctgggatgcctggcaccctgcctggcaccggggaagccctcagtaaacagggatattattaatactattgttatttttgagagacaaacggctgaatcaggggggcagtgaataatcatctggtaggtcagatgatcaatgtggctaaagagggatgaatgattcagacctgtatttctcaaagtgagttctgtgactgggtgcttgttgatattgcagattctagggtgggggtccaggaacttgcatttttagcaaccctgatgtgcattaaagtatgagatccattactcatctaagagctgggtaagccccagttctgggtcaggagtactctattttcctcaggttcacactttcagccatggaaatagaaaaaattatctatgtattccctcacctttttctttttatctgctcagaaagaggctgtgattagagagtgaacctagtaattatatcatattgcatatttaaaaggtagtataaaatattttctaatatttgcgaagcttaagacaaaaaaaaaagatcaatgattactaaaggctcttctgtaatgcatagtataaatatcttgttcctccgggcagagatgagatgctgagtgcctagaagatatggacacttgaagaatctatggacgagcactgttatgtttgcttggtagggtaaaatcgaaattactaaagtatatagatgagactggcagagtatgctgaaaaacaagggagattttcttagaccaggaaaagcattccagatccagagagagctcccttattggaacacaaacacagagactcctggagcgaccagttggctgatttcgagtgtaccatattactacctgctctatcttttcaatgaagagctttttgctacctagcacgggcagtttcttctttctgcagccctgacaatgaacacccaccactctgggtcattcatactcctctacctaaagaaacaaatggccaggtgtggtggctcatgcctgtgcactttgggaggctgaagtgggaggatcctttaagcccaggagtttgagactagcttgggcaacataaggagaccccgtctctacaaaaaataaaaaattagccaggtataatggtgcatgcttgtagtcccagctactcgggaggctgaggtaggaggattgctcagcccaggaatttgaggctgcagtgagacatgattatgccactgcactccagacttggcaacagagcaagatcctgtctcaaaaaaaaaaaaaaaaaaggactgggcatggtggctcatgcctgtcattccagcactttaggaggcccaggcgggcagactgcttgagctcacgaatttgataccggcctgggcaatataatgaaaccccatctctattaaaaatacaaaaattagccaggttgtggtggtatatgcatgtagtcccagctactcaggaggctgaggtgggaggatctcttgagcccgggaggtggggttgcagtgagccaagatcgtgccgcagcactccagcctgggtaacagagtgagaccctgtctcaaaaataataataataataataataataataaataaaaaaataaaaagaaataaaaagaaaagctgcccttttctgagggacagctcagatctgtcagaaaacagcgataccgttgaccatctaattgtaggtctttatgcttaatgagtatctgagggtgggaaagtacatttaatcagagctggggcatagacttgggtgactacttatttgaaaatctgagtatttatttgaaaagccttgaatacccggcatgatcatctcaattactatgcatgcattagtgagcaatgacatgaatgagaaaagtgaaacacattttccttgtgccctaaattgtattatcctttcttttcttaattgtttgatatgtatacaggaaaaggaggctcctattggtcactcctttatgaaaaaatccccagggaggctgacccagctgcagtggtcagaagggatatttttttacctttgcactttctggatactcttccggggttcggtgcagcaagacgtgccctttgttggggatatttagatatatacagtttgctgctatgtcatcaggcacagtgagtttgtcgtagcggtggtcactcatctgttgcatgatctataaagagaaacaaagcaggcctaagaagagtaactccccacactttcaaacagaaggaaggcagtgtggtaggatacaagcttggaactgacactttaggctgttcctctgttcaaattcccatctattacctccagtcacttagaaccagaaaaggaaaacttgattaagctatgagtctttggaagaattgcaagggtttttgttgctctttaaaagtatgtgtttgtctctcttttcttttaaggttttaaaaccgtctattatttttctagtctttgttcgtaagacttatcagtaagatgcaaaatggccacatgtaaggcccagcaggggttttgatatctttggctgagtaagcagggctgcctcctctataggaaagaagggccataccagtaatcagaatagtcaataatgtgaatctgattaatcagtaacaccacacgtgtgtgcatgcacgtgcgtgcgcgcgcgcgcgcacacacacacgctttgctcttccacatacttttaaactgaattcacctgttcattggcaggtgatggccttaatacaatgagcataaaagccacctggggagaataagaaaatcatattcccaggcctcacccttagggaaagctggtttggcagattttgggtgaggcataggaattttgcattttgaagccctacagataattttgaggcagaggttccctggaccacaactggagagaaaaaaaaaaaaacctacttggcaggtctgttcttcaaatgatgaacttattagtatcctagcataaaataactttaaaaacaacacaaaaatgaactctgcacaaaatttaaaatattgatacctcatccttacctcctcaacataatcaaaactatcaaaaaacaacactcctccccctaacaacaagaatatccaaattaaaaacccacaaaaacaaatattatttggggtttagtcatgtagactctttctactctttatcaatatccatacagttttaaggaatctgctgaaatatcatgctaggaaggtataacatgatcttttccacaatctggttctaatctacctttatggtcccatttacttttacttttcagtgtttgtatggaaatgtgcttcatattactaggcagacatgcccactcagtcatgggggcactggatagtaagatttatggtatgaaaagcagaagagagacagcatgcttcctgtagaaaattcattcctaagagtggcacatagtaagcccttcctgactcaccagtcaggtaaatcattcacttctagtgtggaatatgtcaagggtggagagaggccaagagcaatcccataatggaatacccttcacatggaatgaaacatcaggaatggggatgagcttatgcactgtatgaaaggctgagacatacagatgaacaggtcacagacccagttttccaagattacagtttagtggaggaaactgacagaaaaatagataattatattacaataagaactagcagggcaccatgccaaacattttacatttattatctaatctcaaacttctattttacagatgaagaaactgcactgagagaggtcaaataacttgctttaggtcacataggtagattcaaacccagatctgtgcaactcaaaacgtttcttaatcatctcactttgctctttctcaacttctgcagcaggaaactacctcctacaaactacataacacctactttttcacattcacttgatacttattattcattctctggcagtaccattaattcttttcttgtatgtaatcctgttatgacctgctaccgtctggtataggtaaaggacttaactggacatctctcttgcacttttgaatttaaattgttcttgaagggataggcccatagaggggctcacctatggagtgggtctttctttacagccctgattagaaaccttagatctaatccaacatgtgggcaattaagaagttaaagacactcctaaagattaacttttctaagaaaattaacaacatattcaatttagccctctttataaaatggatatgcccagaaataatatgaagacgcttgagagaataaaaaaacagacccaagtagctcttttgttacgaattgcaatttagttcttcttatgcagattttctttttggctgcttccaaaacacaataatagcagcttccatttattattgtgtgcaagggaacaaatgaagaccgcctgagcccgggagtttgagaccagcctgggcaacatggcgaaaccctgtctctacaaaaaaattagctgggtgtggtggcacacacctgtagtcacctcctcaggaggctgaggtgggaagatcatagaggttgccaccagccgagatagtgccactgcactccagcctgagccacagataatctgtcttggagtctaatccttagtcttaaaaaccataaaagactagacctaccatattctcacaattacttcttcagcttccttctttctaaggcctacgttaacatgtaatctagtagtgttgcaggcttagcatcccttctacctagatcccctagagagataattgctacaaagttcccaaagtttttggaataaggacaaattttactatgagtttttgtgcagttttgctctcttcaaccagactgctacctccttgaatgcaggtccaggcataatgaggtggacagagcatgggcttcagagtcagaaaggtctgggtctgaagccttgctcagccacacactaattgtgtgactttgggaaagtcacatatgccctgtgagcctcaattccctcagcagtaaaatgggatgggaatgctatacctatcctccacagggtaactctgaagattatttaaaaaaaaccccaaaacagataatgtacataaaatgcttagcacaagcttctagcagatattaaatgtgtaataaaagtcggttcacttccctctttgtttcttgcaagtcacttgacatatagcaggtgaccaaaatatgtttgcactaactggttcatttcttcattcctttcacctttttaaacgctacagagaacctcaggagggcactgtgatgaactgtgtggtcaatcacatgggtaaacaattgaattccctcagagaaacaaggtatggtctatgtccagaaacagaaatacaactcattatttttaatgtgaaaaaacatggctaaaatcaacaaggccaaggtttgtctgtttttcaaagccatacagaagggcactatactctgtggtcctaactcaaatgactctggatgacaaagtaagacaacagggggttggatctggaattacctgcagagtatgtggcacctaagggcattcacagaaagaaagaaaagaaaaacttttgtgtatatcaaaccgaacacataagcctctgtcaggttgtgaccccaatttagtaaaatagtccataaacccaatgggcagattgacttcttcatagtagagtggggctgcctcgatatgcaaggtggcagttaggatttgtgaaacttctagacaatagcttttggtcagtctcacaaacgtgcttttttccaggtgcagggaatgggattccactatgtctaaatctctgtttattatgtgctgttgagggtggaccaagatggccagtctgctcatgtttgcagtcagaactggacggtcatcctgtcacatgaattggacctagtttacccaagaagttcagaatttcttccagacaactggggaggcagttctctgagccagaggtttactaagtaggaccccagtggtttgaggacctcagagagatccttagaacatgtatacacaaccactgctacctggtcaacctagacacaaacaaaacaaaatctagaaaatctattactcacattgacttacttttctaagcaattgggaaaactgtgtgtggcatattttggcccacacattcaggctaagtgctcccaccactcataatcaccagataactgccagttggctttccattttaatttgtgatctgcagaagcttcattgtactctttacccacagataaataaatcacccatgtctcttagtaccagatgaattgaaagagaaagaaacatggcaagactacatctcttaggcctgactttattcactggatctagcggtctgggcaaattccccacctctcagtgtgactcatgcatgtccggaggtgactacaaagcaaaagcatggaatgtcatacattccagaggaagtgttctcagggattgttatcagtgctgacttcttgtttaccagtgaggaaacaaactaaaatctccaaggttgtgcccatctcagaaagtaccacgtgtcactgaagtgacagggcctgtccagttgacttcagctgtttccatgctctgccctatcccccaacctcacctccttgagtgaacaatcctctcccctacttggttcctatttgaattgttcttcagttactggcatgtatttgaaattgtaatcactcttcattctttaatgcttcttccttttctgagccttattttttatcatttaaagcttctggtggggacattcctatacttactaacataaaggccagtacctactttagaattatttgaggacagtttcaatttttcattactgggaggaaaggaattataatatctttagtggggaaataatttaatgctgagaatatatgaagtaattcattgataaattctactgagagttactcttaaaataaatgtcttaacaaaaccccaacaaagctaccttaggagaagcttttcaattaatttatcaagactccacggttatcattttaagacagatttaagaatatgcccaaagaaatgacttttaataatgaacaggccccatttggagcagtgagtagttctgcttaactgaaaaaaattacaaaagttatgtcaggtgtagcctttctaaataaaagggatgtatgaagtggtaactgtagataacaaacaagaaatatgcttttcccccttgaaaatgctaaaggtgcttattataaacacaaagagattttgtctttcgaggcaaagaacagatttctcctttcctgttggagtaattattttcctttctcttgtatgttgttattgtctgaataagcttaccatttatttgtagctgggtttaggagacacatgtatgtacacaagacagggtgctggccattcagcagggaacatgcagagaaagatgcaggaaggctgtgttgctcttgaacatctttccctttttacaccctaatgggcactgtgaggatgtgttaacacatcctgtctggtagggtatcacctcaaagagctcaggctcctgaggactgagcaacagtgaggccaaggaacaggttctgtttcccctttgtggatgcacagaggctttgttaaaagatgagcaccatttcaaatatcccgagaatgcagctgttgggccgtttagttctgttccaacattttttcctaaaaaagcatggaggaggtggtactgctccagtgctgtatgtagtgtttttccaaccccagggactgtacttcctgcttctcactgtgtctcaagccagaatggaaaggagacacacctaaaccctccacacgtcaccacaaattcctttccctaagagcagattacttgatatcctgagaggccccagactcaactctgaatgatacaaatgagttctacaggatttgggggaaagatctgagaagtcaagttgctgttccgaatgccctttctgaattttgccaaaggaatgattccactttatggaaactaatttgagtgattattatggggattagatcaattggtggtcagctctgttcaacaatcttttatggtacgcccccttcgggctcagcacaatggcagtgtgaggtgggaaagggaaagagatgccttcaggagatgaaaagctatcatttaaggcaggacaagcacatgaagagtatgctagcagtaaaaagacagtcaacctcacttttatcataggcaactccttaacgaagaaggcacgcagctgtagggaggaaatagctctgagaatcattgtggccacactgtcatggtctgttatgcagctgctggttggaggaattggccttgttccccagggtggagctgtcacaaaatagagtgggaactgtctggctttcagcccaagagaatctgcatggcaagttgcattaacaaccaggcatttccggcagttcccaacatttctgggaattttctcatccaaacgactgaaagcccactccattctcttgcttcttactcatgctttctttgtataatggtaattatgttttaaaaaatcctgggctatgttgtttcatggaacaatttagaacttattggtcaaactctgaagcaaaggtatataaaaggtagttagagatgtttagggaatattcaaagcacatttttgggtcactcataattgatctttatattcatatatgtatatatatatatataacataatgtacccatcttaacatatcaaagctaaaccagtattaaaaacaactgactatggtctattgatacaatatatgatgcccaagtacactcttcattgctactgcatatctaaaatcatttatttatttatccatccatcaagagtgtattgagagcctgacaacataccagcatcaagccctggaggtctttttaaggctgagccaatatagctatggataacattctaaaactgatagcatattttcatgttttatagtctttccacagactagttcaaaatgaacactgcctgagaggggctttaagatgactgactagaggtactggacacctgtttccccagcaaagaagagccaaaatagcaagtagataatcatactttgaatagacatctaagagagaatgctggaattcagcagagaagtgacagaaaacacctgagatactgaaggagagggaggcaaggtagacagcctggctggaatcagctgggagcccagagagggtccctagtgagaggaaagggtaagtgagagattcccagtggtacatgttcccatgttgactgctgaaatcctagtcataagagtctctcaaaccccaaggaccctgaaactggtattcccggggtccgtgtggcagcattgctccagagatggagcccactcgggtcccatgtacccacttagttctggacagatagagagccagttagaaagcccatttcccaccagactgcattgtgccctgggacccagcaacccctgtatcttcacatccctggagccccactaacagagggctgcagggtgcaatgcaggttggacacagtagagtggcagggtctccagaactctagcccacacattgtactgcacactggggagggtgatcctgggacaaagggagctgaagcatgtgtttcccagagcatgaaacctgatttcctggggccactgtcaatgaaataaaaccctgttcccacagtagaagggctgcttcacactagcatgtgtcctgaggtcaggctgccaccattgtcatagccacctgagcaaaccgtctggggcttggaaattgctctgccttgttcaccacagcctgggcccatgggccccatggggggcctgagaataggcctgcctggcctggcaccacccctgtcctccatcagtgcccaagcacattgcctgggggcctagggattgcccctccccattggttgacccaggtgcatatgcatgccatcagggggcctaacaggaccagaaaacctactgctgaaacccaagcatgctgtctggaggctgggggattgcctcaccttgtctacaacagctggcatctgggcaatactcctggaacttgagaataggcctgcccagcctgccaccaccaccactgctggcaatcttctgcatgcactacctggaggattggggactgggctgcccagcccattgcagccaccgctaatatcagtgagtgcccatggggagcctgaggactcatccagtcatctggcacactgctgccataaccagcacccaagaaagctgcctggaggccccaaaatcagccctctggacttgctaacactggcgcccacatatgccaccccgggacccaagaacaggcatgcttggtctgccgctgccaacagcagggcctgaggactggcccacctggcgtcctatccccaggaaaacctcagcataatctctactaacaacggcagcctacgccactgaggaaatcacagacaccactgatggtgtatagccaaagaaatcctatggagactgcaccaccatatatgcccagaataaaagaaaagtaccctaaccaaccaacaccatagatctatctacaggaaaatgtcttcccctatgaaaaccaatctaaaaaattggaggaagtgactgttacaccagatgcacagatatcaatgaaaggacacagaaatacaaaaaagcaaggaaatatgacacttccaaaggaacataataattctccagagacagattccaataaaaactaaatttatgaagtgcctgaaaaagaattcaaaataacaacattaaggaagttccatgatatagaagagaacacagataaacaataaaaagaaattaaaaaaacaactcagggtatgaatgagaaattcaccaaggagatagacatataaaaaagaaccaaagagaaatcctgaaactgaagaattcaatgaatgaaataaaaaatgcaatgagaacttcaacaggatactaaatcaagaagaatttcagaactttaaaaagaagaaaaaaaaacaagaaagaagaaagccaatgtgacctatgggccaccataaagcaacaaaatatttgaattttgggtgttccaaagggtgagagaagtttaatggcatagaaaaacaatttaacaaaataataccttaaaactccctaagtctagcaagagatttagaaacaggaagctcaaagattccaaaatagatacaaccccaaaaaaatcttttccccagcatattataatcaaacagtctaatatagtctttatgtccccacccaattctcatcgtgaattataatccccataacccccaggtgtctagggagagaccagagggaagtaattggatcacggggacggttccgcacatgctgttctcatgatagtgagtgagttctcatgagatctgatggtttgataagtgtttggtagttcctcctgcattcattctccttcctgctgccttgtgaagaaggtgctttgcttcccctttgccttccaccatgattctaagtttcctgaggcctccccagcctttcaggactgtaagtcaattaaacctctttcctttataaattacccagtcttagacagttctttaaagcagtatgaaaacggactaatacagtgtaaaaagtcaaagacaaataattctaaaaacagcaagagaaaaacatctgatatggtttggctctgtgtccccacccaaatctcatgttgaattgtaattcccaatgttgggggagggacccggagggagatgattggtcatgggggcagatttcccccttactgttctcatgatagtgatttctcacaagatctgatggtttaaaagtgtgtggcatttcccccttcactctcttttcctcttgctccttgtgaagcaaggtgcttccttacccttccaccatgattaggtttcctgaggcctcccagccatgcctcttgtacaacctgcagaattgtgagtcaattaaacctcttttctttataaactacctactctcaggtagttctttatagcaaagtgagaatggattactatagcatctagacacaaagaagtctccatcagactaacagcacatttctaatctgaaactttacagtccagaagaaaatgggatgatatattcaaagtgctgaaagaaaaaaactgccaattaagggtactatatccatccagtaaaattatccttcataaatgaaggacaaattcagagtttcccaaacaaccaaaaactgagggaattcatcaccaagagaccagccctccaagaaatgcttgaggaagtcctacgcctggaagtgaaagaacaataccttccatcatgaaaacacacaaaagtataaaacttactggaagagcaaacacacgaatgaggaagagaaagcattcagatgttaccactacagaaaaccaccaaaccacaatgataaacagtaagagagaaagaaaagaacaaaggatatataaaacatccagaaaaccactaaataacaggaataagtcctcacatatcaataataaccttgaatgtaaatggcttaaatttttaacttaaagatatagagtggctgagtggattaaaaaacctgtgacctatccaaagtaatgaaggttattaaaaaatatttttttaaaacccatgacctaactatatgctgcctagtgaaactcacttcacctataaaaagacaaatatgggctgaaagtaaagggacagaaaaaatattccacacaaaccaaaagcaagcaggagtagatatatttatatcagataaaacagatttttaatgaaaaacagtaaaaagaaacaaagaaggttattatgtaatgataaatggatcaattaagcaagagaatataacagttctaaatacatatgcacccaacactgaagcacccagatataaaaagcaaatgttggctgggcatggtggctcacatctgtaatcccagccagcactttgggaggttgaggtgggtggatcacttgagctcagtagttcaagaccagcctaggcaacatggtgaaaccctgtctctataaaaaatacaaaaattagctgggcatggtggtgcatgcttgtagtttcagctgcttggaaggctgaggtgggaggatggcttaagcctgggaggcagaggttgcagtgcaccaagattgtatcactgtactccagcctgggtgacaaagtgagaccctgtctctaaaatgaaataaaataaaataaaataaaataaaataaaataaaataaaataaaaaacaaatgtcattagatctaaagggagagacagactccaatacaataatagctagggacttcaacactccactctcagcaaaagacagaaagtgaacaaagacacgttagatttaaactgcactttagaccaaatgtaccaaaaatatatggaacatttcatccaatagctgcagaatacacattcttcttattagcacatcaagaacattcttcaggatagatattaggccccaaacaagtatcaacaaatgttaaaaaatcaaaattaggccccaaacaagtatcaacaaatattaaaaaatcaaaatcatgacaattctcttcatagaccataatggaataaaacaagaaatcagcaataagagaaatgttgaaaactacaaatacatggaaattaaacaacatgctcctgaatgactacaaggtcaatgaagaaattaagaaagaaagaaaaaaaaattccagaaacaagtgaaaatggaaacaacttaccaaaacctgtgggataaagaaaaagcattgttacaagggaaatttataccaacaaatgccaacattaaaaaagtagaaagatttcaaaaaaacaacctaatgttgcacctcaaggaactagaaaagcaagaaccaaacacaaaactagtagaaggaaagaaataataaagatcaaaacagaattaaatgaaatagagttaaaaaataatactaaggatcaatgaaactaaaagtttttttttgaaaaaataaagaaaattgataaactgctagactaaccaagaagaaaagagaatggatccaaataagaggagggaattcttcctaactcatttcatgaggccgggattaccctgataccaaaactagacaaggacacaacaaaaaaaactacaggtcaatatccctgatgaatatagacacaaaactcctcaacaaaatactagcaaacaaaatccaacagcaaatcaaaaagatattacaccatgatcaagtgggatttatcccaaaggtgcaaggatgcaagggatggttcaacatacataaattaataaacatgatatattgcatcaacagaatgaaggacaaaaaccatatgattaatagatggtgtgtattctctaactcagctccaattaaaatcctcattcttgtttcttgttttatatcatctttcccttctatttttagttatgttattttgctgtacttaggtgtctttgtaagctgcttttatgaggtgaggtgtgattatacaatgtcaaacagttcttctaaaaacatgtttttaaattatcacactattacaagtgcatctcgtaaaaaattcaaatatgaaaagttaaagttctgttggacttaactgcatacacttgtcaaaactcattgaattatccatttaaaactgtaattttattgtaaggaaattatgtcacaataaaactaatttttttttttttttgagatgtagtctcactctgtcacccaggctggagtgcagtggcactatcttggctcactgcaacttctgcctcctgggttcaagcaattctcctgcctcagcctcccgagtagctgggactacaggcacacaccaccatgaccagctaatttttgtatttttagtaaagatggggtttcaccatattggccaggctggtctcaaactcctgacctcgtgatccacccgccttggcctcccaaagtcctggcatgagccaccacacccggccaataaaattaattttttcaaaaagttaaagtcccctttcctccatagtctatccattttaataactctgaaaaccctcctaaagtctcctgatgcaatttcctttaaaagacacactcactcagagcctgccttcaatgaagagaaaagagctgccagtccacacttttgcattatccttctgtgcaatccacaccagtcaccgaacttccatctttcatcagctttggttgctctccagagatctttctcaaattctctctaacaagcttcagggatgggaccagacaaacttctcccccaaacagagatctgggtttccttcctcttgccactattccttcttgtagaatttagtatcatgtatttagtatcataccacaggacttcttagctgggaaggaaggcagacttttctctatgtctgagggactgtgtgcctaatgagaatgagcataataaaaactcactgcagatacattgtattttaatatacatatgttatcaacagagaaaggcactatatggaaaatgtgataaatgaaaatctttcattctgtaggcatttctttctaaaaagacagcattttagagaaaagttagcatttcataagcacttgtatttcagtaatctaggggagttatgcttgattttccttcatatgagagctatttctctaaagtgccaggtattttactcaatatgacattattctgaatgattttaggtgacattttctgttcaaggacataacaatttactttaggaatagattttctctccctgccttcatgtaggaactgacatctggtgaactccagacgcagccagtgttctcacagcgtatggattacctgcatcagaatcacgccatggttcccagtcttgctgaatcagaatttctagcggtgaaccccaggaatgggatgtacattttaagtgtgtactgtgtgtgattcttgggtacattaaagtttgaggaccactaacttacactattcaaattaatatgatctggctgggtgtgatggctcatgcctgtaattccagcactttgggaggcagagatgggggatcatttgaggtcaggagttcaagaacagcctggccaacatggtaaaccccatctctactaaaaaaaaaaaaatacaaaaattagctgggcgtggttgtatatgtctgtaatcccagctactcaggaggctgaagaaggagaattgcttgaacctgggaggcggaggttgccgtgagctaagatcgtgccattgtactccagcctgggagacagagcaagactccgtctcaaaaaaaaaaaaaaaaatatatatatatatgatcttcacacctaacaggtattgttactgctactgataatatgactggtagtagccgaactttatggagttcttatcgtttgccagggtgtgggtaaaaaagaaataagtgattagaaaacatacaaaaactctaatagattcagcgcttttcatttagctcctaattgtttttcattgttgttgtttttggaaccctataacgatgagtcacctctcagtatgtggtcacaggtttaaacttggtcccacttcgggaagagataaagggaatggctgttgtaatctatctccaaagctacctttaacatttgcaaacagatagtgtgatgagtaatatggggacccaacagcagcaacagaaccatagctgagaaaatgagatttagaaatattcttaaagattattggacaaatacaacattttgaaagatgaaaacaaggaaaaatagtaagtgattaagagcagggcaatggtagtgggatggttttgcaggagggtggtagaaaatttaatgtgtttcttttgcatgtcagtatttctaaggatgatccaaattctagtattgtgtcatgtagtggggaagttttccccggaggctgcagaataattcatggtcaaaatgtcacttctaatttagtgtctatgtttcaccctatgctttattaaccttcagccaagcaataggatacttatcaacacctacggcatttaatacatgtgatttccacagagaaacagtaacccaaaactcaaaaccctcctccttccagctcaactgacaacgtttcctaatcccttcaagaccgaaggtactggtgttggcatggctgagactatcacataggtcatgctgtgatgtacgatctcagcccatgagacagaaatcatcctttttttttaaatcttttgccaaatcaattcagccaataaacaatctaacactgctagagatggaaggcatgcaaatgtttttaagatgatttttttggtgggccttgagagagagtaacagatgaaaataaatggaaaagggtaaaggacagagactccagacttgagtgagcactgattccactgctgccaatggaaactgaaatggaagccaaccccgttagtgtcttgcaagcttaggcatcggatgcctaccagagctgctgtcatatctgagtactgctctattcctaaaatgtgaatctaggtcagtgaaatccagcaacatttgcccaccaatttttgatggtctgttcctttgtggatgaggaatgctgaattcatggtgacagggagagtttaaactcttttccaaaaattctaccaaaggcacgccattgtggtagttatttctgaagtcattttgttcatcattgtccccaggggcacagaacaggagttctgtaattatcttccaaagtgttgatctggtccctttttctccctttaaagtccatcagtcacgatgttctgttacttctctaagtgggcctcactttctgcactgccctttccactttcacagctactttcctagtccagatcctccactcatttattcatagactgtgctgtgcaatggcatcagctagttttattactcctaatccttatccctgttaaatcattatgggaaccgtgccagacagatctttctgaaaaaacaccttcagcttctactcctctgctaaaaaaaaaaatctgtgttgtcccccacagcccacagataaggaaaccccgatttcattggccaagataatttgaagcagccccaacttgtatctttcacctctctctctgtttccctgcatccagcccccattccagccattgtctcttgatggtactactgacacttccccaggctgtcctgtttgtaataaccaccactcttctgtgccagctatgcctgacgttcattcaggtgcactcagactttgagtcctgcttctggttgatcaatccctctccagaactcctaccacctttcctaggaccctgaaccatttattagccacttatgttgtgttgcacggtgacagtttttatcttttaatgttctctcttgtttctccagctaaatgggagcagccttgaaggcagagatcatgcagagatcatttctcatccgactcagtatccctgtgcttgggatagtatctttcatatattaatagttgctgctcagtaaatcttaccactgtgatgtcttttcaattgctgttttaaaagtctttttgcagaagagacagtaataagaggttttgaaaatcttagctgcttttcctatcagagttttatgtatgaattagaaaatcatgtttgttagatatccaactgaatagttatatatgtaattaaagcttcttctaagaaaatggaatgaagttggaatctttctgtggttttcctcaaacaggcataaaaacattgctaagcacaaacagatataaagatgttccggctgggcgaggtggctcacgcctgtaatcccagcactttgggaggccgaggcggtggatcacgaggtcaggagattgagaccatcctggctaacacggtaaaaccccgtctctactaaaaatacaaaaaatcagccggggaggtggcgggtgcctgtagtcccagctactcgggaggctgaggcagaagaatggcgtgaacccgggaggtggagcttgcagagagccgagatcacgccactgcactccagcctgggtgacagagcgagactctgtctcaaaaacaaaaacaaagagaaaaacaaaaacaaaaaaaaaccccagatgttccatcacttacaggcactgaaaggacaatatcacattaagattctacagtgagcccactctgaagtgatccttaccactagtgctttataattatatggttgctactttttgccaagtagttgtttgctccatcctaggtttaagacacagcatttcaccttgactggctgttataaaatttccaatgggaaggaacaacactctcgattcctactgaggctaattcaactttgttttttcaagaagagaacgagtataggagataggggtcacatagggagagctggaggcagagcaagaatgacaatccatgaaatggattctaagttctctgctttgtcctcatgggcattttggccctgtaggcaattatgcttctttagtagaatcaacatatgattattattttaaaaagtaaggtattctctaatatcagtaatagtgtgaagtttaacttttttccccctttttggcatatatcttcacacagtaagatcaggtcctgttgttaggtttttctatgagtgtgtgtgtgtgtgtgtgtgtgtgttggaggaggaggtatgggaatatgagtcaaatgcaagcttcctgttctcagaaaatgataacattagtgattttggtaacttggaatattttaatgaggaattttagcatgtcaaatggattaaatcatggcatccaaattattacccagttaggtattatatttcaagtttatacaatgtttaattctgggcaggaaaaacctaagaagtttctagttttctatggctttaatttgaatactttctttacttttactgctaatgtaatcgggatatgttattttgcacctgtatgacaaaaacgttggcttcttcaggtgcacattattcgggattgtaagctgggcacttttggaagttgcagatatccttgaaagcagtggctctcaaccttggcctgtgcattagaatcacctgcagagcttttaaaaaatgcagatgcctgggttccattccagacccagaatatcagaattttctgagataaacccagggtagtatgttttcagaaagctactcagatgcctttaaaccactctcactaggaaccactaatttaaggtcacttatagactttttctttcagaagttagagtcttgggttgaaaggccccttataaggctatgtggccaaccatccaacagatgattacccctacaatatcctatagagtcagtttaatactttttgatggtctagtatatactggacaggatgaacagcacttttaaatataatttattcctttttccctttgacattttcttgaaagcccaaaaggaaaaaaaagcacattattccctttctcctacttggccaattttgacttcttcctgccttgggactaatgctaaaattcagcatggctgttttggtgtcatagcttcaaattatttattggcttattatgccaaaacattttattttggccaccctagccttgttggcatacagctctgggaatattgtcagatgaggcaactgctgccaggaaaaggagcataaacagttgttacaaattcagaagctatttggttttgtgttttaatttcttaatacacgcatggcagatttaaaaaaatcattgttttgtggagctggtgaatacaacagccagatagtaagacaaaattaaacctacaatgggattgtcagtatgcctttcatagcagagactcaaagtggaaaatcttgtggctacacactataattccctgtgacaacaataactaaaaatgcaaagtctttattttttccatttcaatcaccctgttgatatgagctagttagttctcattctgtcttttgggttttgctagttgtcattaaaggaaattccaggcaataaaaagcatataaaatccaaacacattaagggtttttccatcttcattttttatatgaccatctataaaataacatggacatttttggacataaaagcaatgctgcagctgagtcaaaacaagaggaaatacagtctgagtgatctctattatatagttagtcattcaaaagaaaaacaggctgtgtgctatgcaatttaaatgaggtacaaagcagctcttgtgttcattcaaggaatgttagaaattcagttagttatttcaggaagtagataagaaacctaaaagacatttccattgagatgcattgtgagcattttaatttaaaattacaagtctattgaaaaaccacatactgtatttaagctccatttacatgacaaaggcacaaaaaatggagtggtgatctcataattcttttcttaccacgtccttgtagtatttttattaaaagtatttttaggtaataatttattgtgatacaaaagaacagaattactaattttaaaaaagtccaccaaagaaaactatagctgtatcccataaatatacacaaatgtaatatatgaaaaaaatgaaaacaaaaacaaaacaagacaaaacaacaaaaaattcctctcccacggggttaggaaggtgaggatgctcctcctgctgcccggccagcagatggcacagtcctgtagccggtcagtgctgcagtccctcccaggtggggtcagcagcttcctcctctgaatagtttcaggaaagttttagctaaaggtaccacctcccctgacctccctccctctctcccttccctcccttcatccttccctcccttccctccctcccttcatctttccttccttaagaaaatttttttttctccaattgactggaagagtgaatgctaccaatgaggtcaagttaaaaatcattactgagaattactgtgagtccctcctgaggcagatattactatctgtcctcctgtgacgatagcatgtaattaatccaggtttttggaaaagaaggcaatttcagggatggatctagaaaaagaacaaggtgagatgtggtatagatttactctttcttatgtctttttcccccttaattaaaaaaattaaaaacagggtagtctgtggaaaagacagtcatcatgtagaatggtaaagcagggggttaggagttaggcacacttagttattggagaattatttctgtaagtcaatcatagcctacttccaacaatgtaacatatatatttttcctaaactttaaaaaattaaagtatacaaagtgtaatatataaagtataacacacaaagtggccctctggaccatgactgcctcccttcatcttaaaataactattattctgacaggtaacagtagagagtagctttgcctcttgtttaactatgtgcatgaaagaatagaatatttattctttgggggggttggcttcttttgttcaaactttggagtaactggagtactcatctttttagagaaggcaaacattccttctggaagagtacaaacaggtctaatgcctgtgtgctaattaatttgtcttacattatttttttttttttttacaggtagaggggtatgaaggtgagatgcaaagttgggagaaaaactataggaaatgcaggttgctctaaaaactaatttggcctaaataatagtatttctaggatcagacttgctgttaaatatctagcatttgttcaaaccaacctaacttctagtacctttgccatatggatggtaaaatgcagtaataatgtcttcctttcttctttccctagattggtaccctgtattaaatgtgttgtggtggccaggcctgtaatcccagcactttgggaggccgaggcaggcagatcacttgaggtcaggagttcgagaccagcctggccaacacggtgaaaccccatctctactaaaaattcaaaaattagctgggcgtggtggcgggtgcctataatcccagttactcaggaggctgaggcaggagaatctcttgaaagtgggaggcagagattgcagtgagccaagatcaagccactgctctccagcctgggcaacagagtgagactccatcttaaatgaatcaatgaatgagtggatgaatgaatttatgtgttctgggctttttagctgagaattgctaaactcttcctagatggatgatttcatttaaatatacaatgcacacactattaactctactataatctcaaatggcaagatgatgatctccataagaatccacttcattaaccaagagtagattgcaacccattacaaagtatttcaaatgcaataaaactacccagaaacccttggggctctcagctttacctaaacatgtaagaagtagattctgaaggaaccaagtactcagagagcagtgacagaggtgagaagtaatcaagctttcggtgtgtagcacaggaaggcacaattcacctctgtttaagtaatatgccctttaaagagatgcccaagtgaccagggacttctctacagaggaaagaactgagacatcaaggtttacaagggaaaaaataaatatctggtaccaaactcacacctatcctgagactgctcagatcctggataccagtaaaaaatggaaagtcaggagataggtggaaagacacggaaggagcagacaagctcggctagaaccaatctatggcaaaataattagaaaaggttttctaattaaaaaagaagattcagtatggagtaggttgggcaactggggccaggggaatcagggcccaggaaacttgtttctggaactgtaagatcccactcaaaatgattatttcatcaggtctcagtattttgaactgtaaaatgggaaaaacaaagccaataccacttttatcacttataagtgatatatttgtctctattcatctgtcttcctgcctgtctataataacatggagtatttatatttctatgttagttagcaattaataattgccccattagatctaattaaatgaaggagcttctgcacagcaaaagaaactatcatcggagtgaacaggcaacctacagaatgggagaaaatttttgcaatctactcatctgacaaagggttaatatccagaatctacaaagaactcaaacaaacttacaagaaaaaaacaaacaaccccatcaaaaagtgggcaaaggatatgaacagacacttctcaaaagaagacatttatgcagccaacagacacatgaaaaaatgctcatcatcactggccatcagagaaatgcaaatcaaaaccacaatgagataccatctcacaccagttagaatggcaatcattaaaaagtcaggaaacaacaggtgctggagaggatgtggagaaataggaacacttttacactgttggtgggactgtcaactagttcaaccattgtggaagacagtgtggcgattcctcaaggatctagaactagaaataccatttgacccagccatcccgttactgagtatatacccaaaggattataaatcatgctgctataaagacacatgcacacgtatgtttactgtggcactattcacaatagcaaagacttggaaccaacccaaatgtccatcaatgatagactggattaagaaaatgtggcacatatacaccatggaatactatgcagccataaaaaaggatgagttcatgtcctttgtagggacatggatgaagctggaaaccatcattctcaacaaactatcacaagagcaaaaaaccaaacactgcatgttctcactcacaggtgggaattgaacaatgagaacacttggacacaggatggggaacatcacacaccggggcctgtcgtgggatgggggagggtggagggatagcattgggagatatacctaatgtaaataacgagttaataggtgcagcataccaacatggcacatgtatacatatataacaaacctgcatactgtgcacatgtaccctagaacttaaagtataataaaaaaagaaaaaataattgccccattattaattttattgatggttgtaacatagaaaccaaactgctctcaaataaataaagcagctgagttcatgcaaacctgagtttcaccaacccatttcgaacctgtgactatttccttaggagagctcattattccccagatcagtttgtcctcttattttcactacaaggtaacatgacatttttgatgctagaaacatggcaggtgggcattcaccaaatccacaggcctgtggtttaggcagtacatttgctgatggaaaatgcaatctccaacgaatgcctttctagctagtgaggattatttataggttctgacaagtagaaaaggaacatcattattaacactaactcgaatgaactctacagggaggaggactataaagtcttcataggatgcccttaacagatgtggtctgagagaatttgaccatgggaagggaaagatgaagagagaaataggggtgagttgccaagccatgcaataggacttagggcttggggtttttttcctaggtcatcagtggtcctcttttctgactgcagggtcttccttttccaatgttggtccaacatctctgaaacaatgcagggctttctcctcaaagacccagattgctccctcacggtgataatcttgtcttcctcactgttaagttcctacttcttcagatctcacctgccccttccacctgtacccctggaaacccactagaaactctacgagttgagctggtttgctcacatctcatcaatgtactttgctcagtctttgcttatgccatgtccccacctgtaattttctctcattgaattctaccctgtcaaatgccatccatccttcaagactcacatctagtctcatttttctctacaaagctttctctgaatatctaggcctcagggaacgcccccttttcctctgaactttgaagagcagttagggcctatatcatataacgtagtgctaattagtcatatttgattaccttttattttgttatgtgttagtctctctagactatttgagttacagacctattgaggtagggaccaaatgatttgagttagggacctgatctacccagaatggcagaaggggccactttttctagttggtccacccagaagaagttctttctgctaatacacacaaatgcatggtatagaccagcttaaaccctctcatcttataatcgatctcagacatatgcagaccagcctaggtaccacggatagataccacagtccctaaggagaaaaataatcttcctagacctcctgagtgacaccatttatcaaatgttttctttcaagacaccagctttttttatatgcaagaagttgacatgaacttccagatggagcagaacaaaagacattctctaaagtaaacgaacaaaagccaccatgatacaaatcaaattctgagacagattgttcagcaacaattaataaaagccttagaaacagaatcaaagataccgtttgggaagaggtggaagaaaggccaggtgagctagctcaaagagtggcagataatacagagaggaaatttagctcaaggaaacgattgcttcccagccaaaccaccacacttggcactgaggtagaagagaagagacctgaaagagcctcagggcccacagatttgctgtctatgactaagaggaacttctggctttggccctttaataagtcatgcatgctcgtgtgcaggaccagctaagaggaaggggctgcagtcctgacccaccatttattattagcactatgacctggggtgagtcacttgatctagttttctcatctgcaaaatggagataataccacctctctcattcatttatccatcccttcatcagacatttatgaagggcccactgtgggccaagtgcaaaggagcataatgatgagcaaaacagacacagtctttatccttattgggtgtccagatcatctcacggggttgaagttacagagaaggaaagggaaagcactgcattgtaacaacagaaggtcatcttctttatcaatgacttccactcttgatttagccgtgtgacctgggcaagtctaattttcttctggcaagtctactatctataaaatgaggaaatttccggtcttaaaatgttattattccaaatgcaaatgaagaagttaagctttttaggtacttctgaaccatggctttctaaaagattattatgaaatagtccagacgcaacaaaaggataagaataatataacaaaccctgtgtaccaactctccaacttaagtgagaaaacattacaaggagctcaatctggtggcatgccctcctttcccctgagggataatgttgatgagtttggtgtttattattttgaatcatggccttttttttaggaaatctggtgtgtaactaaaaacagttcaccagtgaagagttcttcctacacttaggtgttcctggcttctaatgaatgtgaggtcacaacagtgcacatcacagaagctcaaatacctgcctgttctctccctgccaaccctgcttgttactcccccagcagagagaatgtgaaaaaccctgtggcaggcacccccactacatttagaaggagcacagttttgtatttaccttaagggccttctgtgcagattcactagacccaattgcgatcaggttaggcccagccatgctgcagaaactcttcaaatgcaacccatctgccactggcactgtggagactgcatagtcctacgtggacaatagaaaaacaagcagtttagtattgcagaataattctaaaactgattaaaaacctccctgaaatacacctacttcttgaaggctgacagggaccttgaatatttggaagaaaaactgggacccacagatttggatattgctagttaaacgaagactgcttctaagaagacagtagagtcaccagatgtgtgactgctgcaacatctttgctggctgtttgatctatggagtgggctactctgggagggtgtatttgaatatcctgtgtaaacagtggctcagctggagactcacatcctcatggggaacggagcatcttgagagttatatcccttcctatgcagtgtagagagccaatctattaataatcaatagagtaaagggaccttaagaggatgtacgtgcaacacctagcacagtttacagcacacagaaggcactcaagcacaggtgacccctgattccaatctaaaaaaaatctgtatttcataacagagtcaattgggtttccaagttttttttttttttttttagaaacagggtctcaccatgttgcccaggctcatttggaactcctgggctcatgcaatcctcctgccttggcctcccaaagtgctgggattataggtgtgagccatcacgcccggccttccagatttttttttaagttgttgattgttccaggaacatctgccaggtggttgtataattatacactgggagaagacagaagatgcccatgctaacttagttgttcttgtggtagcccagtgaagctgaattattgaggaatttgaattttatagcttctaaaacttctagtaaatgtacaaacattacgaattattgtacaaagccagtgaagcgtaaacaccattactcatgacattgattcaatggttctatgattatttattaagtaattgctttgtgccaggcataaactaccttttacctaccttaaaagtatcagccaagatttcagcacctcgttgatttgtccttttggaaaggcccacaaaaaattctctgcctgtaatagatgtcatggaacatagtgagcaggtggcaccagtgactgtacatcatttcttttatctataaataatgaccttaaagcatcacacagttctctcttaccacagagaacagcttcactaaagagactacaaaaaatgatttcaaactactgcccttaagaataaactttttcaaattcaaaagggcagaaagcaggatggtggtttccaggagccatggggaagggtaaatggggagttattgtttaatggataggaagtttcagtttgggaagatgaaaaagttctggagatgcctggtggtgatggttgcctaacactgtgaatgttcatgcctctgaactgtacacttaaaaatggttaaaatggtaaattttatgttatgtatattttactacaataggaatgaaatttttatttaggcaataataaacacattgataatctctgatcagaaattaagtaatagcaatgacaatttaacagtaaaacagttcctcaaataacatcattttgctcaactttgatgaggaaaaagaaaaaattgattctgagctggggccatggtctgtagggagtttgtacattctctctaggcctgcgtgggtttcctcccacatcccagagctgtgcacagcaggtgaattttcatgtttacagggtcccagtctgagcaagtgtgggtgtgtgtgggtgagtgtgctgtgatgggacggtgtcctgtccagggtgggttgccgccttgcaccccgagcttccaggatagcctccagccacccttgatgaccctgaactggaagaagtgccttagaaaatgaatggatacaaatgattgtaataaagcatccaataatcatacaaatgtacaacaataaatgatgtcgtaggaaagtgctcaatgagcccaccatatttgtgattgttttgagctgtatggtgggaggaggggctccttacagttttatctttgcaaatatttattccctgatttaacccaccaccacaactgctgttactcagtaattggccaaaaattgggcaattatcttgtttttattaatttaaaaaaatgtgcatatggctgacatttatttcaatgcttaatattataagtgttttgggttttgatttagaagctgggtgatatttttgtgactagaaatatgccagaggaacttaactcttgtttatattagcctatggtaaaaatggttttgttatatgtcacttcgcttaaaagtcacagtttccatgaacctatcaacattgttaagtgagaatttattatactacctttttttttttcactaaaagaacagtactagacattgttgataaattcggattcttttcttataaaatgatcacgtgaggcctgaggaaacaatctggggaaagtgagttaagtgctgactggtcttcaggtctgacctctaaaagccgtgtctttgaaactacacattccatatatttgaaatcaaaacatcaaaagatacctatgtacaaagtacaaaatttctgcaggatgaaacttcattcttatttgacttttctgaaattcagcagtttttctactcagaaggcaaaacactagataaaaatggtctcttagttataggcaaataattatagtatggagttaggcaatacataaatgtgggaactctcatcttccctttatttattgaaattccacataatatgtggaaaagatattcaaagagaaattagtatctttttgcctcagagtattatggtgaagtataagaagagtagccatgcagaagtgcttgatagattttataaatattataactttaatcttcataatgtccttattaaacgggcaaatgacataggtcaggtgatgttacgacaatatccaagggcttatgttgttggcagacacaggaatcttttgtggcacactgacagttttttgggtaatggcatgattgtgttgtcctttaagaaaactcattatataaagatcaaaatttaactcaaggagaggtattttacttgaaaaaagtattatgcactttattaaatagtcagctacaatgaaaaaataccaagtttctttaattctttcaagataaaaataggtttataaattaatttatttataacttttaagaaaatcttttaagaaaaacataatactctgaggcaaaaaaaatactgatttctctctgaatatgttttctcacatttcatgtggaattcttttccaagaaacaaagggaggaagaaaatttccacatttatgtatataacaaatttatagggtggcatgcataccatttccattttaaaagactaaggtgttcggagcgtgatgtgggctgattgaaaaaaagtaaaaaaaggctaagatgtgatgggaaagtacaaagagaaggatgctgcttatctcttcaaagtaggttggacttctgtctctggcagtacgttggatgagatctcctaaataatcttcctgatggaaacaactaaaatactgaaatggacatctaaatttttttgatgtcttttgtgtcattttcttctatgccaattcacaatttttgtttttccccttcctgtctcagtcatttataggagaaaccaggccatttttcctactgactgtcctacattcttgctttgactggttgcttcctcttataacttaacatttaaattttttcctttatcctttgtattttcagtaagcaggcagtttcatgtagatggttaattagatgctcattcatatatttttttaataggactactgtgtgttcaagtggcatcagcctgattccctcattataaagtttcctgtcaagctttcatatagcagttttaatatcatttgttgatcattgcacagatccattatttttttattaggaatctgcatttactcgctgcaaccctaaaaagaaaatctctcctcaagtatttggtctacttgaaatgaaattcataaaggaaagaaaagctaaatacttgagtctttcttttacatataaattattacagttatgagttagtgttccaccaacttgcaataataaccaataagtttttttaaaaaaaacctcattacctttgaatgaatcaaagattaaatcacagtggaaattacaaaacatttaaaaaaactaaatgataacaaaaatatccacataaaaataagaaggagtctgctaaagtagtacttggaggccaagttacatagcattaaaagcttacattagagaagatgaaaggctaaaattaatgagataaaattccaacttgagatgtagaaaaaaagagaacagagtaaaaagaaagaaatgtgaaggaaggaaatacagaaacagaaaagaaacattcaagagaaagagttcaaccaagccaatagttggtccttaggaaagattaataaaattaacaaacctctggcaaacaaagaaagaaggcataaattaacattaccaatgaaaagataatatagctatagttgctgtgaagcttaaacagatattaggaaatataagtaactttatacccaacatattgaaaacttaaaacagataaaatcttagaaaatggaacgcatcaaaactgactcaggaaaatctaaattgtcacataatcattaatcaactaaatcagttttaaatttctccataaagaaggcacaagagcctgtttccaaagtttaaggaatatataattcaaatagtattgattctagagaatagaaaaagaggaaatattccctaatacattctacgaggctaatgtaactcttttatcaaaaccagacaaggataacaagaaatataaattataggccacaaaaataatagtcataacaaaatgttatcgaactaaattcaacactgtgttaaaaagagaatacatcatgatcaaatttgatttcatgctggggttgcaagactggtcaaatatcagaaaatgaattaatgaaattaactacatcaacagattaaagaaaatcatataatcatttcagtgacaagaaaaagagtttactctatcacctgaaattcatttccaggtgtttactttagagaaactcttgtatatgttcccaggagacacacacaagaatgtacatagaaacacagaagataatccacaaaaactggaaaacatccaaaaacacatcagtagtaaaattaatacatacattatggtgtattcttatcacagagaactacacaacattgaaaatgaactacagctacacacatcaacttagatcaaaagtagaaaaatcacctaagagttcatataatgtgactctaataaaggtatcttgtagctttataaaactacaagacaaacaaaactaaaacaacatacactttaggaatacatgcatggaggcaaaactcaaagaacaacaaagcaataattaacacaaaattcaagacagtggttacttgaggtcaggggagaggctggttttgactggggaccccacaggggtgtctatggtcctggcaatgttctacttcttaagtcaggaggtggacacccaggtgttcattttattattgatctttaaactgtacataaacattttataactcttttttaatgtactctatatttcacaaaaataaataaaagtagaggtaagttgctgtctatttaagagaaatggtattgaaacaatttttgccagtagctgcttgcctgactgacagatttcccagcaggaactggatttggaaagcagctttccttctgtccatttcctgataaattattaatgaggctttgaattacagagaaaagaggacatagagcacatagaaaatgttacagaccttatttcttatctaactcttcctaatccaaaaattgagtggtaatagttgtataacattatgaatgtaattaatgtcacttgaattgtacacttaataatggttaaaattgcaaatgttatgtgtgtttaaccgcaataaaataaaagagatgaagaaaagtgacaagtagaaaatagaaggcaggaacacacattaggtgtgaatggagtgccaaggaggtaaagatatcccaacatcatctcagttttgaacaaagtaactattaacacattaacttaagtattgaatataacaaataaaaaaagtctacaggtagtatcaaaggcaagcctaaatgcttagtacctactttgaagataggtcaaaactactgggcttgagatgctagggaaagacctttgaccaaaagaagagactcctagtgtaagttgcactttcacactgaggagattttagggggtctttctggctcagctgctaaaataaatggttgtgaacatagcttggttaagccatatttcaaatgttaacagtacctgcttacaataagttattcattgcatggctatgttctgataaaaaagagttatattgtaaggaagtgtgatttacacatctaacttttcacaaaagcctattttgttagataaacagactgttgttctgtactgtcaaaaagaatgaaagtgccatcaacgggagacacaaagaatattctaaggggaacttactaggcagattcaaagaatgcctgagtctgcttgggcacacccagagataagaatgcagcgtaggccttcttgactccttgttctgtgttcttagggttcaatgggcatgcaaaccaaaccccagagatggaccactgcatgagacagtggcagcacaggtgcagtacacaactccagggcatactattcacacaatccctaagaagaatggcgcccccagagctggcaacgtggtggccccacccatagcgacagtatgtgacacttagcaaagaactgcttaaatgtcacagaataaacactattccttcttcaggaacattaattatgtccaaagtaagtaatgcaaaacattattttgatattaaaacaaaaatggctatatcttgactatacatatatatgagattcaatataaaattcacatcagccaaaatattagacttccaagaagcttcacgctttcagtgggccacttggggccacattcccaagtccctgaggaccagcctttgctgtcagggctacattggtgaaatgtattctctgacatgtctgggaaaataaattctcactataaattaaaattactattgattatcttgctcatcagtataaccagaatgaatttggggacccagattttacacatgattttatacaacactaattatacgataaatgagttgaaaaggttaaatgctaaaattactgtttctttagtagccacattacacactgtaaaaactgactccagtaagatcaataataatattagctgttcatattttgttgagttctgctattatccatctggcattaagccaagtcaatttgcatagaaattatttaaatccaccttgccatctggaaagaaagttatttgtaaatgacactaatcttgaattatgaatcctttaaatacaaaccagatatacagtaacaatggaaaacgatgcaacttataaattcatgctgtagaagaataaagtagaagcaagatacaaagtggtgatgtacataccaataatgttcttgtaaaaatatgcaaatgtatatatacgaagtactaaaaggacatatatactaaatactaaagtgattatatttgaatagaaggtcattttttttccttcttgtgttttcctgtattttccaatttccctccatttagcatctgttactttggtaattaaaactactacaataggctgggcatggtggcttatgatagtaatcccagtattttgggaggccgaggtgtgcagatcacctgaggtcaggagtttgagaccagcctggccaacatagtgaaatcccatctctactgaaatacaaaaattagctgggcatggtggcacacacctgtaatcccaactactcaggaggctgaggcaggagaatcgcttgaacccaggaggcggaggttgcagcaagccaagatggcgccactgcactccggcctaggtgacagcgagactctgtctcaaaaacaaaaacaaaaaaacacaaaaaactataataaaacaagtaaatacaagccaagtattaaaaatattcttggatagaaaaaataaatacaactatacctgtgaataaaacatctccgccatctaaagttgcattttcatctttcatctctactatattgagctgaagtttttctaatgcttctttcatcatgtcaacctgttgaaaataaaatgattcagattactatgctacaatttcctaacaagaaaaaaacatccaaaacatctaaacactaaatcaagctctcgtgcacacacccacacacatccacactcatatacacacccatccttgtgaatatataatgtatgaccagtcatgatcatttgtaagagaagaaatgatctgttaaaaattgtttattttgttcccttctagtgtaagattgagtcaatacagtgtcatttttttctgtagaaagctgagtagttacaatactgttggaggccgactagttaagacactgttggagtacgaccagttaatgcaccattggaagctgaccagttcggccactgttggaggctgacaagttagggcatttgttagaggttgactagttaggatattgctggagtctgaccagttagcacactattggaggctaaccagttagggcattgttggaggctgactagttagggcacatgagtaaaggaaggtgggaggcaaggcacccaattctgaccagttagcacactattggaggctgactagttagggcacatgagtaaaggaaggtgggaggcaaagcacccaattatcctacccttgccaggaaatacaagattccattttaaatcttatgtcagtcatttagtcagaattgcacacacacacacagtataatacatggaaggaatatcaataactcgtaatttgaaatctcaacccataggacaatcactgttttctattcaaatattttgtaaaatgtcaaaacatcctttgcttctctgtaaatgtaaactgtgttagttatattcaaacagttaatatgattacccatcttttaaaacctagttccttagaggtgattaacaagttcaacaattacaatcaaaccaatgaatatttgaaaataaatttcaggaatttgtatgattccagggcatgtctaaagcacagagatattctgggttgaattaaggaacacttctattgaggcttactttaatataagaaatgaatgtgaagcataacaaattgaagctcacaatttaattcaagtccttccagtagctcaacaaaacaatttaaatattttcaaaggtctgcaaaacctttaggatagtaaagacatacaatgagatgactcgaataggggacaagggaacaagagatcacatcacactgggcaaagcaggtagttcttccaaaaatacaacatgctgagtacacagtgtgaattgtcagtgaagagtttaagagacacaaatagagcagagttacttctaaagtaataaaaatatggaaatactttgacaacaagcctgacattcatgcattcaaaaaacatttaaagaggatacaaagtaaaataaatatatcatctcatccttgtcctggaactcatgtaaaaattccacaaaccagagtgactcagaacaataaaaaatatttccatggacaaaatggtcttaatgttgtagtaaatacattcagtgacctcttttaacagcagaataggttttcctatgtaataggaagtggaattgttgctacagcataaaataaggagcaaacacaatatttaccatgacttgttgggctactatgaacccaggaaaacacaactgtttccttttgacatctctgcttctttgtccatggaaaattcactgagcttagggagagatcatgagaacagatatacagttactttttgtttctattactaatgctactgcttctattataacttaacatttcaaagattaggaggagttgagcaataacataaattttggtttgaaaagtttgtatgtaactatgcaacatttcaactcaggaactgtattcaattcttaaaagttagaggagaatagaagtagggagtctactatataccagtttcagaaacattacatctctttaaatgtcctatgtctttgaaaattaaaaagttttagaggataaaatgtttgtgcttttcttttcttttcaagttaaaacagctgcactgacattaaaaaaactagctcttgtgcaggggcagtacttaaaaaaattcaatcacatctatacaaacagtcatcaggataggtccataccacacatgttgatgatactacattactttcagagttaagcacatggacaagatttttaaaaaattgtaaatatcaagtaaacagttttgagaactgcagggccatatggcatcaaatcggcaatgctaaactgagggagatttctggagaagaaatgagaggctgaactcggcaggctgtccattgggaaccacacactcttggcattgaggttccgttgaagcagacaaactcagctgcaaacaggcctgacacatgggtccatagcaagccagctattcaggcagttagaacactaaatataactatagaagtgggagtttttgcaggaaaagatccaaaccatgagcctttaagaaactgcccattctgtggttacatggccatggttaatgttgactttattaacttccaagaggaaaaaaaatgaccaaataacacacccacctttcattgagacagtaaccctgcagtgtggaacttagcattactcagagaaaccatcaggacaaacagtattaattccaacggctgagctgaatgggtcattttagcccacaaaattagaaataaaaagggaaaattagaaaaacaacctacttaatttaagccttagagtataaagtatatacagtaattttcattctttactcaaaagatttacaagacctttcttccctcccttttcatgctacatgcactttgcatttcattttaaaacaatgttatacttgcattttttgccccatttttctcctcatactatttatcacagcatagatttcttctctggtcacagctgctgcagatcacctctgctgcttccagttctgctacttattagccagtgtcctcaggttatttagtattctgagcctcagttttctcacctttaaagtgggtatttattcattatagtatcaactttttaggctccttctggtcattaaatacatacaagtcacacagtatttgctgaataaatattgtattttttatgaataacagcttgtgtatacacagtgacagatacttgtactataaaattagtgcacaagaaaacaactgttgttttttcttatatttggacatgtttcttgtgttttatccctccatgacagatcccatctgctttcctgtgaattaaaattatagattttttttttgcaaagccagtatacagttagagaacatacattgaggatacatttaaatttaaatttagataatccaaatctgatttccttccagctcctggaagctgtcaagacatgtggcaaatttcttgtgtaacctctgctttgaaatagcccttggaaagtactacataaggtgggaagtgggcctgtctggtaagatgttccacaggactcaaaagagcatcagctaagatgatatggaatgatcatggtcactgagaatattaccactctaagggacccaatcagtctaaagaattctttctctttctcaatgcctggtctccttccttacccttcccttttctactctcttctttccttcttttacggctctcatttccatcctatcatgttttcatgattatcctgtcttctcttttcactccctttagaccttcatggtgagtggcaagaaccagggattagaataaagtctttatcacttattagcaatgtgacttggataaattcacctctctgagtctcagtttcttgacctgcaaatgggaatagtgctttctctctaacagggattatgtgagtaacaaataagataatacatgtaaaacacctagctcagtgcctggcatattgtgctcaaaactagtagttgatgatattattattttgccctaaattaactcagtcctttgtttggattttggctacctttcaaaaacaagtaaaagataaaaaatacaattttctgtattaaataaaacatcttttaagttcagttttccttttgttcttgcaaaatctccctcaaacctaaaatactaaaagaactcccaaaaaacccaaaactctccctaatataaaacaaaacaaaaataaagccttatatagttttactaggaagctatattcataataacttgttatagcactgttagtttaatactctttatttcagggcaatattttccagttgaccctttccaaaattgacttttgctgtttattttcagtaatgccccttttgaatgtttcacatcttcgttctaaatgttgtgaatgtgcttgtggggcctggtgaacagttctgagctatggctccttaaagaatatgcaccaatctgttagccaagctgctttccttcagctgtttctgctgctagatactatgaaataaatgtggccctcaaagttggcctgtctgtggctgacatgtctcagtcaaccacagttctgccatgtgctagaagctgtgctatcaccaatgtcaccactatgttttcaatgcctgcttaagttgtcctggtttctttgtaactcatcacattacaggagctttaaaattatagaatcattctacccctacacttgtctagctccagagagttgaacagtagcaacatagctttgttggtagtgagatggtttcatctcccaactttttgctgattttgttttgccttttaatgttgagtgtgacatgtagataatgctgaggaagctgttcaagaagctgtcttggcacatcaaggcacagatggcttggaacttgctgatgcatcaaaatcactatattgtctgaggtcatattcaaaagaccacattttatttctttatgctactttaaacttctttgttaatcagcacatctttggtcactgtggccacttgctagtacacttggctgattttatgacattgcttaatgttgtatcacattttcacacatattttgtcatgtgaataacatctcagttcaacaaatatttggtggatgtcaacttttttttttttttttttcaaatcaggctacaattcttttttttaagccacagcccttgcttgcctctgtgaaattaatctagtggaacagatacaccttctgaatatatagtgacaataaaatggaatatttgttgtgatgctcacaataactccaaaaagaagaaagggtagatattagtatacccattttatatatgagtaaactgaggctaagggaggttgactgacttgccgagtcaagcctccggagcccatcctcattttcacttcactgtatgattaagattctcctgaggtctcatcatagagtgcagcccacatcagaattggagcccatgccttctgccttccaattctgtacatttaagtccactggatattgtaagatcctgtgccaaggtgactttgtattccatgatctcttcatatcagagataaatgaaatttctgtatattagggccttaggatgttaagttatagagtgattaagaacactaagtaatatgaacagaatatataaaccacaccaacctgtttcaccaagaaaaacctgcatattcattactaccctttgatttggagatgccttaggtttgttcagtggttcattcctaaatttgtccatatgtgctgattactttcttttttttttttgagacagagtttcactctttttgcccaggctggagtgcaatggcatgattttggctcactgcaaccttcgcctcccaggttcaagcaattctgcctcagcctcccgaatagcttggattacaggcttgtgccaccacacccggctaattttgtatttttagtagagacggggtttcaccctgttggccaggctggtctcgaactcctgaccttaggtgttccgcctgtctcagcctcccaaagtgctgggattacaggcatgagccaccatgcctggctgtatgtgttgactactaaaactagccaaaactaccaacaaaaagggatcgaacagacattttgtgtactcaatgatccggtcttaaaaatttctaaataaaaacatattgggatcctcttctatattctaattttaggacaaagctctcagaaggaatttagttagcaatggtaacagcaaacatttatatagtcttcctatgtgccaggcactctactatgaactcatattaaccttatttaacttttacaacctgatgaagcaagtacaagaatgatttgttttacagatgagaaaactggggcagagtaagtaaatttgatcaaagtctcatagcaagtaagcagagagctgagatttcaacttagctttgctcttaagtttgtgttattctttcctacacaatattgttactaaccaacaaatttaggtatctacaatgaaatcgagtgactgtgaggagctacagtactctccaaaacagattatgttcactattatttatttattgaacaaaaatgtggactcagacattctggagaaatggaaggatagaggctacaaattgcagcagtctgaacttgcatttggtttctaaacagtctaaattttgcttttctaagcatacacaaactaaggctaataaattttgggagccactactttctcatcagagtatgaggaggagttagttatttgtgtaaaaatctttaggtagtcaacagtgtattttaaatagtgaggttaccaaagcatatggatatgcagacacactccaaaccaagacattatatacactccaaacaaaagtgatgaatttagagagatgagaagggtttctaccacactaggaagtatagtaggtagaattctaaaatggtgcccatgattgctgcccccttgatgtacatgtcctgtataaatctctccccctttgagtgtgagtaggacctgtaaatatgatgaagatatcatatctgtgattggttactttacatagcacaagtaaagaaattttgcaggtgtaaagtatctacttagatgacttgagttaatcaaagggagattaccctgggtgggcttgacctaaggagaacccttaaacgtgggtttaaaggttagagacaaagaagtcagagagatgttctgatcttctgttttgaagaatgtaaacatccatgttgtgaattgcctgaagagggcctacagggtggcctctgggaactgagagcaattctcggctgatagctggtaaaaaaaaaaaaaacaaaacaaccaacaaatcaaatgggagccttagtcctacaaaaatggtcaacagaactggaaattatttaatcacgataatctttaaaagttatcaaagtcaaataaatattaaccctgtgattattcagagaactcatgattttatcaaatggtcaatacgtgttaaagttttataaccatttagctcattttccctcttattgaacttttgttataacttttacatgaataagatctcttgaaacatttcccacagactgttacatacccatttcattttttcccattgatttcttggatttccaaacatatgggtttatttctagtggaaactgctaaaaattaaccaagatatttagcattttggtttccatattagtaaacggagggcacaaagcttaaaaatgaggtcatttccggctctagacttctaaaagttgcagtctcagaaaaaattttggcattcataaatatgactctaactgtaatcctattttcctcccatagaatttactgaaaataccccagatggttactcatgagtaaagtattctggtgtttaaccaaatccaatcagaggcaagaggctggatatatgaatgcagacaagatagggcaaacctaaaagtggattaaaaaaactccagaaagatgggaatcctcagaggcaaacagaagattccaatgcagtgggaaacaaagagtgtgtcaactcaacactaacttatgatacttatattttatttttttggaagaacccatcacacagtttctccaaggatgctaattacttgccagtagtgagataagtatatgacacagagaatctacaatgcttttcctataagagagacgtcaggctctgcttatttgccaacctttgtgtgttttcttatttatattcacatgcagtatagtagatttcatcaactttgggttcattccctaagttggactgagctgttaaatccaaccctagagccctggagttcttgatatatgagatttttcatttcccaaaccaatctgagttgagttttctgttagctgcacctaaaaataactcatttattcccatgatcgatcttaacctgaaaaagaaggatctaacaagctccaggccgatgctctgagacacagggtcaagtcattctttctgctttgtcctactcctgaccatatacctgggtgctgctttggttcttttccctgaagtcctgttctagttacctatcccattcccttcctatgagtagggtcctgctatgcgctctgaggatttgagtagatgggcttccccaggtgatccctgttatctttatctcctcaacacacaatcagtatcaacaaggtttgaggaacctcttaaccactcataacactatcattaataataaatacaatttattaagctctttctaagtgccaagcattgtgctaagtgattttgcatggattatgtcatttaattatcaccatattccttaaggtacctcccagtctaaatcaggcatggcagttctgtctcttatgccagggtctggtgcaagtgacccaatattggccactgagggggtgtctgttgagaggttcctggagccatagaaagaaacataattcctcttcttcccttggacattgttctgtatagatgttgtacctggaactggtgagaacacatccatcatcaaatatggcagggcagagagagggaagcaatttgagcctttgatgacattttgagctgccaaatccaaccctagagccctggagttcttaatatataagatttttcattttattaaccaatttgagttttctgttagctgcagctaaaagtaactcatttaggtatacaacaaaattgacaagtagtatccaaagagtcagtaataacaggccactttatcaaactgattaaattctgatacagaaacaactattaatggaggatttttttctgtttataggaatgcaccatgctatttataaccacttacaacactaagaccatcctgcctatagaagacagtagattgtcaaactaaaagcatcccaggattatgttagtttataaagcacaattgttgcagctctgtatatcagagctggaattaatatttcaacactcttcatctctgaaccagtgctcagatccaaagggcatatagcatctaggaagattagacagaaatgtggaaggcaaacccacggagccaggagaaataaaaagcactctggacaaaactaggaaagacccttttcattatctggagaatacactgagaaagttccagaggttcaaaggtccctccataacgatgtcactacaagacagtttcccggaagaaggctggaagtgacatttagctttctaaatgaaaaacaaggcaggagctctgctggtcttgtcagctctcttgatatataatgtactaattcaagcggttcaattccttgttgacgataatgatacaatacatgtattgagtacttaaaagccactgacgttctgtctgcagggggcaaataaaaatatgatttatcaccaaataccaaattaaaataagtgtcagctgccaaaagacctgcaaaatttagtaggctaaaaaccagggaactgacaagtttataaaattctaaactaattttcctgaatgttgagaagcataaaaatttgctgtgcacatgatccaaaataagcaccagaaatagtactcgaagtgttcataattttctgtgaattcagaggaatcgcatgctgccagacacaaacagattaatgtatgggaaatattttgtatgttcagtatacaatttatacattgcaggcattaagctgccctaaaagccatccagcatatccctgctcccagcccaaatgtaggtcctggctgggtcagagattccttctgtgtgctcccatggctcccaggggattctttttttttttttttttttttttgagacagggtctcactctgtcctccaggctggagtgcagtggtgccatcatggctcactgcagcctcaacctccctggctcaaacaatcctcccacctcagcctcctgagtagctgggactacaggtgtgtgcccaatggccaattttttttttttttttttgtagagatggggtctacttatgctgcccaggctcggggcattctattaacaagttctggcccctagttgactctctgtatatgtttactgaatgaacagctgaacaactttgtaagtcagacagaatttctggaaatgttataaacaagtatacggcaaaaatatccaccttgtttagacagggcatagccacggcaagagccatacaacctctgtgacctcttttaaacaactcttacgacatttcaagggtgggaagattcatctttatttctaaaaacccgcaggtgagaaaactaccgttggcctatttgtcccaataatcactaaccgccactcatctccagtaattctgttcatttgcttagtcattcaacaaacatttattcagcattttcaatatacctggcactattctaggttccaagaatacatcagcgaagagagaagagccctgtgtatattctggtgaggatatggagagataggcaataaataataaacattaaaaatattagtggtaagtgctatgcagttatttaattcaggagatgtgatataaaatggctagggtagttactgtagtttggaaggtcaggaacagcctttctgaaagtgtgacatttgtgctgatatctgagtgaccaaaaggaccaactctgttgcccataggaagaatgttccaacaagagccagtgcaaaggccctaaggtgggaacaagcttaacttgttcaaggaacaggaagacagctagcacagtgctaaaatgaagagggcaagtgttatgggctatgtgtctcctcaagattcatatgttgaaaactcccagggcttaagaatgtgactgcctttagagatggggtctttagagagataatcaggttaaaatgaggtcattaggatgggccctaatccattatgactggtgtccttataagaagagcagactaggataaagagacatagatgaaaggccatgtgaagacacagatggccatctgcaagccaggcagaggcctcagaagaaaccaacccttccaataccttgatatcagactgctagcctccagcattgtgagaaaatatatctctgttatttaagatgtccagtcagtggtactagcaaactaatatggcattttaccagataaagctggggttgccagatggggttagctgaacttggtaaactcacataaagaattggaattttaagtattattggaagtcactggagagtctgcaggaagggagtgatataatttaatttacaaattctggatagctgctttgtggaaaatggattggaaggcacaaatggaaacagggaacttagttaaaaagcaactgcagtagtccaggtgaaagaaatggtggtgagcacaagtgtggtgacagtggagacaaagaaagtgctgaatttggaatgtgttctggagggtggacggaagttggtggattggatgtgggggtgaaggaaaggaagggcccagggtgacttttagatttttgtcttgagcaattgagtggataggtgtactgatttctaatatgaaaaattccagggagaggagcaaggctggagagaaaaaattgaagaactgtgtggccatgctgagtttgaaatgacttctagatattcagatggagagatcaaggggagtagtcagaaccagaaataaaaattgggagtcaatgatacaaaaagttacttaaatctaagagatatcagaagagctaactcaaaccatgatctgcaggaagtgatgtgaggaaacttgccttgtccattaatattaacaatactattctaacaaaaagactccaggagacattgctcattcattactgttgcgaagtttggtagctgtttgcagcaatggatgcaaaaatccccctttggcaggaagagctacttaacgtacattcattatgattgcaccaatgccatctagatcaaaggtctggaaacaaataaatggattgtaatgaactttccagaggtaacaggtagtgaagtcatcaagtgctacttcttgccacttgcttgtacattttcttgttaaattcagttttgtagatgctataaaacatagcagtaaagctgggcacagcagcacatgtctgaagcctcactacttgggaggctgaggtagggagatcctttgaggccaggagtttgaggctgcagtgcactatgttcacacctgtgaatagccactgcactccagcctgggcaacacagtaatactctacctcaaacaacaacaaaaaacaaccataccagtagcataagattttattatttcagaaatcaattttgaaattatgatcacttgaattggagacaagctgaagtgcattaagcaaatcaatagtgtaggcaaggctatatagcaagaacaactttcaaacacatttcagatcagtcagtccaaaatacattcacactgtatagcaccataggactaaatgaaagtttgctgtgctaattaaaacacattcatattcacttattcaagtaggtcccctaaatatctgaactgagaaacacttcattagtatatcctcaatgattgctgcataagtaaggctgcatttcttttaaaaatattgtatttgctaatttttcaccaattgtggagctttctcaacagctggtacaagttggtgcttttttgactgttctacattgccctgggtttgagcatgatatgcaagatggtttttggaacactgggatgatttctgggggggaattttgctgctttttttttccttcctagtccttagcttttttgtgtgttattaaagccttcattagagatggttgtgaaaggccctagtcaggataagcagagtgcatagtaattaattctgagaagctgccttctgattccaggctgaagcatggcaaatgattttgtaaatattcaccctttgtcatatgttcatacatttgcttctctgggaacttgtttaaaatatgttagtgaaaaaacaccagctgagtatttggatgcttataaatattaagtaaaggctcatttccaaccatagttgtacaaaatggctagtttcaagaaattgtcctaggttttgataactgtccgtgttctaacattgtgttaaaaaatagtgaatttttcttcactattatcaaatctgggcatcctcagctggaaaagactggaacagttcaatagtattttcctaatagaaacattccggtcaatattctaccaaggaaaactaattatcatctagctaatgagttttgcctttcctaaattactttaaaaaatatggtaagccatatttttcttgccattatagtttttttctccttttaaaaaagttattttttacttctaatttatcactaaatattaactaatttttaagtaaaacactcattggaggaataaccattaggaatataacacagaaggtacttcatatctggttttgagtaatactcaaagtacgataacctcaacaccatctagattctcttcctatgaggcagagtataatgaaattagattctcataaatgtcattgccccctatttactgtctttttccttgaaccaaggcagagctggctaggatccattgtctctcaagcagatttattatagatcgggtgcattccatttcagaacaggaatgtgcgtgttatgaaatgtacaaagcctacagttgaacaaagcacacaatctgtcggcaaaaaaccactattagtttaatagtgggtatagttagtaaaatttttctgatgtatcttaactaaatttaatattacataagttgatattcaaatcttgaaataagtccctagtgaacacagttctgtttatgctgtcaaaactaaatgcatttcagtattatgcaaatatataagtgaagtatttcttattgacgttatatagttagctagatttttcttgttgcttcacttcctcctggatagtaccacaggaactttgaaaagtaaattaactctttcaggtcttcagggcacaatgtaacatactttagtgctcaatgtcatttagaatctgtgcagtgaactaaagagtatctgatatggtttggctctgtgttcccaaccaaatctcatctcaaattgtaatctccatgtcccacatatcaaaggagggacctgttatctccaagcattgagggagggagatgattggatcatgggggtggtttcccccatgcttttctcgtgacaatgagtgagttctcacgagatctgatggttttataagtgtttaacagttcctccttcacacactctctctctttcctgttaccttgtgaagaagatacttgcttctccttagccttctgccatgatttcaaattgcctgagacctccccagtcatgcggaactgtgaatcaaataaatctctttcctgtataaattacccagtcttgggtagtatctttatagcagtgtgaaaatagactaatacagtatccttataaatacccagggagaaactaagagacagctctaagaacaaaaagaatgtgggtaaatttagcagttaaaagacacaaaaaactaggattgcaactatttttttttaagtatgcctgttaagtatacctcttaagacttaaaggaaatatgcaaaaatgcaaagagctgtggttggttggtggaaaatggttgatgtgacactggtggaagaagttaagagatacttgggaccccaaagcctgaatatttaaaacttcatctactacctacaattccagtaaccattgctcattctggttcacaaggcagggggcacagcttgtcagtgcgtactttccattactctaaacatccaaatactaacgtgactctagataggggagactggaccactggaagctgtattaccagagtcttttttgcttgggttatccacccctggttcacctgtggtctactccatccaggctctcactgttggagtccccatacttccctgggctattattttagactgaactcaaaacagccccagaccaactttttctcctacatgacccatttctagtccatgcaaacacttgcacatcctttgtttacaaactctggcagtgcagctatgaccaacacagtagcactttcttggcttcctacctaacctgttagtcaccagctgctaatcctctgtatctcccagacacctatccttggtgtttccaaactgcaaaaatatatttaatctctctgagaggtttatttaaagcccactctccctggacttgaagtgaaaaaggtaacatatcccatcccacaaatttaatgtagagaaattagaaagtatagataagtcaaatagaaccattaaaaatctttgtaatcccaacacccatgcatagataacacttactgttaataatctatcacacaaacttcaacacattcctattaagtatttttatgagaattttttttttgctcatactgttataaaattatactataagcacaaacatagttaaatagaacacagggtactattataaaccaatttaaaaataaattcatactatttaaattgagattgctttaaattagattttctgaaaaaaattatcttctgaaaacagtcttttgttgttaggtaactgcaaataaaataagtaaagctccttgtattgaattttagagtacttcaagacctaacccaaagcagagatacagacttttatggtggtaatataatttgagaactttataaaacatttaaatatttaaagaaatactcaaggatcaattaggataggtgttaaaatttgaggataaaaagctacatcacaattcacagtgtttcttctctaaatatgcatgaatcaaccagagatagaacaaaataaaaatatttagctgccaaaaagaagttgttctgagacatcagtacaggttttcttctgtgatgatatcaagttggtcttgcagcaaatgttgagaaagtaactttacaactgcaaaataatcattggatgttgcacagagagaggtccctctgttctctgtggatatacagagcaaacccagaatgcacctggtcaactcgagccctcattatcttgaagacacctgatattccataagactagatgaggctgccagctccttgtccacactgactacatgccatgtaccccattttataactaaaaaggatttaaaattcatgaagcttgttgaaagctcaactgtcacattctactcattccaaagtgtatgggaaaaagagcagaacagacatttcaactgaagccattattgtgcttgaatagccatattccattaaattgctaataaacctactagacggtgttgatcacatcagccatacagttgcattcctttcctttataccaacttgcccagtttcattctatgcagtattactctttctgtgccctttattccaaggttgcccagaattcaaagcacttattcagtaagtttgtaatccagtttagtatgctattaacagaattctttagaggagatcatggaaaaagaaactcaaactcatttttgggtcaatgaccaaccttaagggaaacacgtattaaaccagtttaaagaaaaaggtcaggatccatgaggtattaaggaaaaaagggaagaaaaaacattcatttccacaattttccaacattccttaaaaataaaaacaagcccaagcatggaatggcaaggccctggtgcccctgtactaatggtggtggacaatactgctattcataggaagtgagaaagcaaaggtttttcctcaacaccagggaagttttggcttcccttaccttcatttattctggggttcaaattggaaccttataaatcttaagtttgcctctcaaagcaaacaataatgtacaatggattaaatgctttaaagtttgctttttaatagcataactaattaactgcctctattgtaaatggcttattaagccactcctattagggtgttaactactgaaaatatgtaaagctgaatagataccgtatggaattaggcatttaaaaataactagtgcactatttacactacctgcctgatgagtagtttatcccccatttagatattaactgaaaatatgtaatggaaaacaaataaaggaaacagatgtcttaactttaaaattctttcatcaaacagcagttattttcttataatttttaaattctatatccatcttagagctttagaagaaagtctaggtctctccaaattcagggtactaaacgcttgcctccatccaggcagttttccagtgagcagagttggagaagcttttcttttcacagggtaacttgtttggaataagctgtctgtgtatccagaatggtctttttttttttagcaaaatcaagctggagaaaagtgaaattcactccctggattaccttatgattatgaaaatatttgtgtctattttttgagttcccaagattaggcaaaataaagtgtttttttttttttcctgcagcttccctgctgaaataccttagtgagaatgcataaaaaccaactctaaatgatgcacaaagccaccgagagtaagtgttaaagcaacaataatgtgattcaacacaaataagtaatagccccaatacaaaaagctgcaaaattacagtaattttacaatccatctgaagtagcaaaacacattgttactttaccaaatattaagtgatcacctaatgtatgtcaaagctacatgcagatatatgtgtggtaaatttctggactggagaattaaatgaaaagaaactagcacaggatatttagttcacagaatcatgaaatgtaaaactcacaagagacatttgtggtcatacagctcaggtgaccaactcccagtaggttggcatgactctcccctgccacagaggcagaagcaggattagaacccaagtccccttgtttacggtttaacaagattcctgataaactaaaaatggttttgatatgaaaagccaatgttaagactatgaatagaaagctgtttctacttttaaagttttagaatcattaatacattattaattatatatacatatatatttaaattgtcttctagactccaagcataaattaacagatttcatttaaagttttcatattggctgggatttcatcatttcatggcatcaaatgaggagccatctgccatctaaccaaacccaaaggccacagaataaatgtggcctggcactgaaaaacaagagtgaagaccatggtactctgatattaggcaggcaggtacatttttagacgtttccatacaattcaaagttaatggtctaggtgtttttcaattggtattgatgaggaaaatgtaaaaatcaaagtgatttacaatgtctgccagattttccttcacagattcttttaggaagcaaaacatctttctctttccttctccccctcatccccccacccccatacaagtagacacacacacacattcagtaaaatttttgagtaatccatttgatgactgaagatttggcttcccaactaaattgataacctctcttcttcttcattaatatttgaaggctgcccacctaaagaattggaaaatatatagtacaaactgtaacaaaatttttgtatttgatctctaatttctgacagctgaacacttggcaaatgtatatataacgtgagcataaaacatgtcatatgaataaagttttcagcatgaatattttataagtgacttattggacttcattccttatttcaatcatattttgcatattgccattttatgaaggacataagtaaaagactattctgttcaacacaaatggtatcaaatttggaaaaccaaaaagggctaaaagaagttaatgagggtgaatggaatcacccctattaaaggtaaagtgatagagcaggtgtaagctattatgaggaggccattttgtatctcctcctcctcatagtttctccctaaatatgccaaaacgaaaatcttagctttggttatgtgcttagcatgtcttcattaataaaaatctctagtaatgtaatggaaagaggattgtgctctgctgtagaaggcagaaaaagtaatagtaaaggagtaccctctctatggaacctgggatttttaatttttatttttattgtttttttgagacagggtcttgctttgccacccaggctggagtgcaatggcacaatcacagcacactgcagccttgacctctgggattcaagagatcttcccacctcagcctccctagtagctgggaccataagcatgtgccaccacatccagctaatttttgtattttttgtagagacaggttttcaccatgttgcccaggctggtctagaattcctgagctcaagtgatctatccacctcggcctcccaatgtgctgggattatagggatgagccaccatggctggccctctgggattctttttaacaagtggaaatcctagcaaacgaaatgccctattctattcttgcaaatgaagtaagcatccagacagctgttttgtgacatcactaagcaagtataacaggaaaaggcagagaagacactgtacatttatctgaaactctacagaaaacttatagtgacaggtagagataatgaggcacagctaaaattctaaattaaaaatatttcaaaaggcaaatttcaaaaagctttttacctttaccatttctaaatttcctaatgtgctttaaatgcaaaaatatgtcttaggccaggcccacagatactaaaatagcacttaatctattgctccattacaagtgaatacattatttccattatggtttatctgtagcaaattttgtttttaacctcaagggaaccgtataatattaagggatgtaagtggccttatagagaattatccagtcccttgttttcacagatgaacaaactgaggcccaactgaacctcttgttaaaagccaccagctagttatatttcagagctgtgtcttctgtctcccagggcagggagcagtgctctttccatcacatccacagcatcggcctcccactaaatggttgcaatagctatagtcaataatggtgcccaactatgctctcttcctggatgacctaatatttaagcttcataacaagtccatgaattacgtaatatttgaaccactattctacagaaaatttatagtgacaggtagagataatgaggcacagctaaaattctaaattaaaaatatttccaaaggcaaatttcaaaaagctttttacctttaccatttctacagaaaggaaactgaggcacggaacacttacataacttgtgaaagagtcagcctgcagagccacaccacacaccactcttcaccattatactactgttcactgttctcttcttttccaaggcatttgttgaccttatattcactgtactctgaactgaacttatctatttcccaaacctgctggcatccttactttccaactcagttaatgtcatcactgtcctctttaatcaccaaccttggaatcttaggtcatctttgactccttctgagttcctcactcttttccacgtttctaccactggaaaggatcttgaacccatgtacactgcaatttcctaacaaaaggcctcattccctgttgcctgaatgattgcaaagcctcctaactggtctccttctaacagctgtcccttctcaaattcatctcacacactggagccagagtaattctgccaaaacaacagagagctcattggtttaaaaacccaagcttacctaacattgtctgttacatttttcttttaagtgtatgaagttttctttttctttctcaatcttctccttgaagccttatacaattttgtgaagttggtattattcttcctatttaacagatgatgaaccaggccgtatgacattaagtaatgtttagtagataatttaaaaacttataaattctgttatgtaaaaatgtaacttcattttcttataagtagataatccgggtaaacacagtcaagtccagtaatttctcaattatttgaaattccaactcagttaaattcaggtccatcccctcctttccactgctttcttcctaggtgacattcacaatgagcatttacccagcattttgtgctggcatcttccaggatgtacaagcatcccaacatagtctcagattcttggtccctggcactggcagagctgaaatggtcatattcccactggcctctggttacatgatccatgctgccttctgtagtcacatattatttgtgataacaaacaaggtaaggatttgtaaggatcagaggtaaggcaggcataacgtagaaaactgactagcacaaggtctcttatttacaattctgaaagcccaaagttctgaaaaccaagggtattcttttttaatttagtgcctgaacttatttggtagtaaaacctgatttgatatgaaagttttagactttatatcatctagaatgaacattcctaggttttgctgcacatatattaatgtggttgattaaagggtgctatcttagacttatgtgtgtgtgttatgaaatatggttgacatactccgtttactttcaaaatatgaaaaattataaattttaaaacacatctggcactctgggtttcagagaagaaactatagacctgaaagatatattctagccgggcgtggtggctcacacctgtaatcccagcactttgggaggccaagacaggtggattacctgaggtcaggagttcaggaccagcctggccaatatggtgaaacctcatctctactaaaaaatacaaaaattagccgggcgtggtggtgggcgcctgtaatcccagctactcgggtgagacaggagaactgcttgaacctgggaggtggaggttgcagtgagccgagatcactgcactccagcctgtgtgacaagagcaaaactccatccaaaaaaaaaaaaaaagatatattctttggatacagaattctaggttggcaagtgtttttttgttttttgtttttttgcacttacaaagattgtcattacaatgttttcagcctgcattgtttcttttatttcaatagttttgggggagcaggtgatttttggttatatggataagttcttcagtggttatttctgagattttggtgcacctgtcaccgagaagtatacacgttacccaatgtgtagtcttttatccttcacccccctcccaaccttcccccagagtccccaagtccattatatcattcttatgcctttacgcctgcattgtttctaatgggaattccgctgtcatcctagtctttgttcctttatatacaatgagtatttttcctctgactgcttttcagattatctcttcactactggttttcagttacaagcataccttgttttattgcactttgctttattgtgatttgcagatactgtttttttttttacaaattgaaggtttgtagcaaacccgcatcaagcaagtctattgatgccattcttccaacagcatgtgcttgcttatatctctgtgtcacatttttgttaattcctgcagtatttcaaacttactacgtccacataagacagcaaacttaatcaataaatgtgtgtgtgttctgactactccattgactggtttgtttccgtcactccctctcctgggggtctacctattcctggagacatagcaatattgaaattaggccaattaatatcctaccatggcctccaagtgttcaagtgaaaggaggaattgtacatttctcactttaaatcagaagctagaaattatgaagcttagtgaggaaggtatgttaaaagctgagacaggccaaaagctaggcctctcatgccagttagccaagttgtgattgtaaaggaagttgagttgttgaaggaaattaaaagtgccactctagtgaacacacgactaataagaaagtaaaacagccttattgatgatatggagaaagttttagtggtctggatggaagatcaaaccagccccaatattctcttaagccaaagcctaatccagagcaaggccccaactctcttaaattctacgagatctgagaagaggtgaggtgaggaagctgcagaagtttaaaggtagcagaggctggaagtttaaaggtagcagaggctggcttatgaggaaagaagccatctttataacataaaagtacaaggtgaagcgataagtgctgatgtagaagctgcaagaagttattcagaagatctattacagctaacacacagcattgtatgttatgaatatggttgatgaagatggttatactaaacaaaagttttcaaattaaatccagtagccttatattggaagaaaatgtcatctaggacttctctagctgttaaggagaagttaatcctggcttcaaagcttcaaaacacaggctgactctcttgttagaggttaatggagctggttaccttaaattaaagccaatgctcatttaccattctgaaaatccttgggctcttaagaataatgctaaattgactctgactgtgctctacaaatggaacaacaaaacttgcataacagcacatctgtttacagcatggtttgctgaatattttaagcccactgttgagacctactgctcagaaaaaaagattgctttcaaaatattactgctcattgacaatgcacctggtcacccaagagttctgatagaaatgctcaaggggattaatgctttttttacacctgctgacacaagattcattctgccacccataaatcaaggagtaatttcaactttcaagtcttattattgaagaaatacatttcatagggctattgctgccaaaactgtgattcctctgatgaatctgggcaaaataagtgggaaaccttttggaaaggattaatcattctagatgtcattaagaacatttgtgattcatgggaggaggtcaaagtatctacattaacagaagtttggaagaacctgattccaactttgaatggtttaagacttcagtagacaaagtaactgcagatgtggtagaaatagcaagagaactagaattagaagtgcagcctgaagatatgactgaattgctgcaatctcatgataaaacttgaatggatgaggagttgcttcttatggatgggcaaagaaagtggtttctcaagatggaaactgctcctggtgaagatgctgtgaaacattgttgaaatgataataaaatatttagaatagtccaaaaacttggttgattgacagagcaatggtagtttgagaggactacaatcttgaaagaagatctactgtgagtaaaatgctatcaaacagcattgcttcttacagagaaatgtttcatgaaaggaagagtcaatcaacacagcaaacttcactgttgtcttattttttaaaattgccacagtcacctcaaccttcaacaaccacaaccctgataggtcggcagccatcgacattgagacgagaccctccccaagaaaaagattatgacttgctaaaggctcaggtgattgtcagcattttttagccataaaatattctttaactgagatacatatatatttttaagacatgatgccattccacaattaatagactacattaaaatgtaaacataacttttatatggactgggaagcaaaaaaaattgtgactccctttattgtggtatttgcttttattgtaataatctgaatggaacctgtactatctctgaggtattcctgtatttgatcatgatgtgtaaagtttctggtattaagtagtgatttcccctcactgctaaggcaaggctcttctgaggctctactcaaagccctgtgtattgtgaggtctctcctttctggcttttaggaatataatctcatttctgcgtgagttctgggaattgtctggtttattttctgctggttctttctctagctttgggtagttcctcttatgcgtgcacagacaaatacatacctacccaaagactcaagtaacaatcctgcatatctctggaatgctgtatttgagcagcccctcatctccagtactctgccctgcaaattctaccattttagttctcccaaactgattttttgtcccctcaatttgataagaccagtaggttctgttctgcatcccctcctccacctctgtggcctgaaaactgcctccagacaataagctgggaaaattgtaatctcaattcatttgtttcccttccctcagggatcagtcctacacttcctgtgtgcactgtctgaaaagctgtttcatatagttggtccagttttctaattacttacagcaaaagaaaaattcctgtagcagttaatctttcatgatggaagtcaaagcttcaagactatacacctaaacattgttacttttctttcctgaccacctctgtgacaacattatataatgtcccataactcaaatgaaaattttttctcatttaaacaatgaggaacaacatttctccccttaacaaatgaacagaagggaggtctagaaattgcttctttaagaacaaatttagtgattcttgatgatcttggtgacattggcatgaaagggagcagacagtgagtgtgataaaacttctttaggatttatttacatgttacttaaaatgctaagctctgatacaaccttaactctaatggaacttggaagctaattaaggagaccttttataactgtatagcagtctgtctctggactgtatttggaagatgagtctgaatcaaagtggttaataagcaaatttaaccatgacattacaattaacagagtctcagaagtacaagtaataatcactgctgattcttttcctcttctcctctgcaatatctatttaagcttttgagtaagacagacttggtctgccagagtacctttgctgaagaactcaaagccactggcacagagtaaagcagctggaaacacagaaccatagctatagccagggagcttttctaacttgaatcaaaaacagattcagaatggcttggagaaaaacaatccactgaaggctggtgaagaagaccaggatcatcttagaaataaataaagcattagtaaaatacatactaaattatagcttactgactgtattctttaacagtttgcttttaagaaagcaacctcattttaacacatatttcaaaagaagaaaagttggaaaatgtgaaatcttttcctcaaataattttgcccactggaaaacccataagtttggaccacaaggccttaatcaaggcataacctcttatctgatgcaagtttactctgcagttagagcggcctggcaggaagatggtataggagagcagctgagctcatggatattggaacaaatgaggcctcattttgaatataggatctaccacttacttactagttgtgtgaccttgggctattactccatgccttagtgcatttgcattgttataaaggaatacctgaagctgggtaatttataaagaaaagatgtgtatttggctcaaggttccacaggttgcacaagaagaatggtgccagcatatccatctgggaagggcttcaaatcacttctactcatggtggaagccaatgggagcaggtataagcagagatcacatggtgagagagatgaaggaggagagagagggaaggaagatgccaggctctttttaacaagcagctcttgcaggaactaatagagtgagaactcacccattaccaggaggatggcaccaagcatgagggatctacccccatgacacaaacacttcccactaggcccacctcttaacattgggaataaaatttcaacatgatatccaaagtatgtaatcctttccctggttccccaaatctcatgtccttttcatattgcaaaatgcaatcattctatcccaacagtcacctaaaattttagcttgttccagcatcaactcagaagtccaaagtccaaagtctcatctgatactcaagggaagttacttacagctgggagcctgtaccatcaaagacaaattatttatttccaagatacaatgtttgtacaggcactgggttaacagtccgattccaaaagggaggaattggacaaaagaatggggtaacaagccccatgcaagtccaaaactcagtagggcagacgttaaaccttaaagctccaaacaatccttgactctatgtcccacatccagagcacaccggtgcaaggggtgggctcctaaggccttaggcagtgctgtccccacagctttgctgggcagcacacatggttgatctcatgagttggagtccaatgcctgcagcttttccaagctgagggtacatgctgctggtgggtctataattctgggatcttgaggatggcagccccattcccacagcttcattaagcaataccccagtggggactctgtgtagggggcttttaccctacatttccctgccacactgccctagtagaggttctctgtgggggctccaccctgcagcaagcttctgcctgggcactcaagctttctgatatatcctctgaaatctaggtggaagctgccaagcctccatcacccttgcattctgcatgcctgaagacttaacaccatatggaaattaccaaggcttattaaggcttataccctccagacagacaattggagaaataactggccggagctaaaagcagcagggactggggggtagtgtcctgaggtggtatagggcagtggtgccctgggccattcccctgaaaccactctgacctcctaggtctctgggtctgtgatgggaaaggtggtcttgaaggtttctgaaacaccttcaggacctttttcccattgtcttgactattagcacctggctcccttttatccatgttaatctctctagcaagcaatagatcagccacatccttggatttcatctaaaagtgctttttccttcctactacataggcaggctgagaactttccaaaattttctgctctgtttcccttttaaatataaattccaacttaagctcattcctttgctcccatatctgattataggctgttagaagcagctacaccacttcttgagtgctttgctgcttagaaatttcttctaccagataaccttcatcatcatcactattaaattcagccttccacaaatccctaggacatggacacaatgctgccgagatatttgttaaggcataacaaaagtgatctttgctccagttcccactaagttcctcactttcatttgagaccttgtcagctgggcttcactatccttatttctatcaggagtctggtcacaaccaattagccagtctctaagaagttccaaactttcccttgtctttttgtcttttgagccctccaaactcttccaaactctgtccattatccagttctaaggctgcttccccattttcaggtatttttattgcaatgctccactcctcagtaccaattttctgtctatgatgctataaaggatactggaggctgggtaatttataaagaaaaaaggtttatttggctcacagttctgcaggctgtacaagaagcgttgcaccagcatctacttctgacaagggcctcaggctgcttccactcatggcagaagggaaagaggagtcattgtgtgcagacatcacatggtgagagagaggaagcaacggaacttggggaggtgccaagttctttttaacaatcagttccaggggaactaatagagtgagcactcactcattactctgaggatggcaccaagcctttcatgaaagatctgcccccatgacccaaacacctcccactaggcttcacctccaacactgggggtcaaatttcaacatgagatctggagagacaaacatccaaactatatcactcaacttctacaacttctggttccttgtctgtaaattggagatcacaattgtgactatctcatagggttgatatgatgattaaatgaaataatacatataaacagccttaatgaaaagcctgacacaaagtgatccctcaatcttagttatgtgccattactactattgttaagaaaaaataaactttctcttgaacaccagtcttataaatacaagtcatataaatagacagtaattgtcattaaactatgagattacagaaataatgtgaatgaaaaagtcattatataaaaataattgtaagccttgttcacagtgacccatgaaaaaatgcaattggaatcataaaaggaaacaacacactaaatttgcctcatttttctgagtaccatttcaaaatctgttgtccagaatcattagaatacttaataaagtgtaaaatgacatgttacatgaaaaaatcatgaaaatgtcattataacaacccagagccatctcctctttggcttatctggatgtagcacccagtaaatcctagtagatagtaatactctaggaccaccaatggctctctgaaaaatgtcacaaaggagaaagtgtcaccttcactgtgctcctgatgaagctatttctatctactttcagtgtggagtatttggcatcctgactgacagtctgtttaaagttcaccggcccaggattcacttaaaggaattcaaatagacgacccctaagaggctatgtagcaaaatgattacattcacaggttttgaaattaaacaacttggttcaaatcctttttctgatagttgctagttgattgggaaagatattacactctgagcctcagtttcctcacccataaaatgatcattaacagttgtttttaggccaggtgtggtggctcacacctgtaatcccagcactttgggaggctgaggcaggaggataccttgagcccaggagttcgagatcagcctggacaataaagtgagaccctgtctctactaaaaatgaaaattaaatgcactccagcctgggcaacagagtgagatcctgtctcaaaacaaacaaacaaacaaacaaaaacaaactggaaaaaataaaaataaaagttgtttttatctcaaagcgttgtgatgaataaaatgatgtttataaagctcttagcatggtgacctactcagtaaatgttcaataaatattatttactaactattaaattttagtctgggagtctagactatcccatacagaagtctcagaataccaactctgtgctacttccagcactgctgagttatccattcactgaacagatgtgtgttgagtggctgatgctgtctcagaccctgtgctcaatgctttactcacttagttgaaatcctctcatcatgatgggctttataagagattgtgagctctgtgaggctagagtctctactctgatgttgatggctatataaccatgtaatgtacggggactggcacagtgcctaccaaacaggagatgctaacaagttttatggaatgaataaatgagcaaaggatgaatgaatacgacacaaggaagattaactccttgacctaggggaactcatgttctagttgggagttggaattagctccctaaaagacaatggaagcaaaaagtgttagagagggaattttagagcccaccatgctagtgggctcaccattagtaaaatatcaacaatttctgttacagttatgctaatgtaattcagtgataagagcaaaagaatgcataatccaagttgacgattctagaagacctcaacttctaacgaaaaacagaagcatcttttttactacttatcataggaaaataaattctagtcgtttttatatctgaagtcaaaagatagaaagaaatatgtggtcgcatatctttctatgttaagtcaagcccagtcctgcctcagtgtcctcaccctatttgctggtggttaggggtgtcaatcaccacctcccacctcttctctaccttatggctaattaggaagagacaaatgacaaatagggatc

SEQ ID NO: 9 - DNA, 1633 bp, Homo sapiens
  Genbank Accession No. AB001915
  unsure (1)..(1633): n = a or c or g or t
aacttaatgtttttgcattggactttgagttaagattattttttaaatcctgaggactagcattaattgacagctgacccaggtgctacacagaagtggattcagtgaatctaggaagacagcagcagacaggattccaggaaccagtgtttgatgaagctaggactgaggagcaagcgagcaagcagcagttcgtggaatcctgtctgctgctgtcttcctggtttaggagccgacgggcgctcgcaggctcagcgcgcgctgcccgcggcaggacccggccgcctccgccgccgccgccgcccctaagcctcccgaagccatggccgggctcggccaccccgccgccttcggccgggccacccacgccgtggtgcgggcgctacccgagtcgctcggccagcacgcgctgagaagcgccaagggcgaggaggtggacgtcgcccgcgcggaacggcagcaccagctctacgtgggcgtgctgggcagcaagctggggctgcaggtggtggagctgccggccgacgagagccttccggactgcgtcttcgtggaggacgtggccgtggtgtgcgaggagacggccctcatcacccgacccggggcgccgagccggaggaaggaggttgacatgatgaaagaagcattagaaaaacttcagctcaatatagtagagatgaaagatgaaaatgcaactttagatggcggagatgttttattcacaggcagagaattttttgtgggcctttccaaaaggacaaatcaacgaggtgctgaaatcttggctgatacttttaaggactatgcagtctccacagtgccagtggcagatgggttgcatttgaagagtttctgcagcatggctgggcctaacctgatcgcaattgggtctagtgaatctgcacagaaggcccttaagatcatgcaacagatgagtgaccaccgctacgacaaactcactgtgcctgatgacatagcagcaaactgtatatatctaaatatccccaacaaagggcacgtcttgctgcaccgaaccccggaagagtatccagaaagtgcaaaggtttatgagaaactgaaggaccatatgctgatccccgtgagcatgtctgaactggaaaaggtggatgggctgctcacctgctgctcagttttaattaacaagaaagtagactcctgagctgcagagtcccccccggtagccggcaagaccgcacaggcaaggccgatgactctgtgcccactcctgttgttttccttgacaatctactgtgccactgtgctactaactcttgtttacaaaatttgattctaagttgaattgcttcattcaacacccccaccctccctccccrcgaggtggtacctaagctgtggatttgctaaatgaattaagcaacctagaagatacagagctaatgaattatcaaaatgtgattaatcccagtaaggaaacactcatttagtgtctgtatttttggtgtnaaaattatttagttgccagtatattctgaagaatgtcttcttgatcagtcagataagcttgctttttttttttttttttcatgaatcatgtttggttcctgtgaaagtccctggtccagggatcctcctcctttctcttttacttctg

SEQ ID NO: 10 - DNA, 732 bp, Homo sapiens
  Genbank Accession No. X17620
tgctgcgaaccacgtgggtcccgggcgcgtttcgggtgctggcggctgcagccggagttcaaacctaagcagctggaaggaaccatggccaactgtgagcgtaccttcattgcgatcaaaccagatggggtccagcggggtcttgtgggagagattatcaagcgttttgagcagaaaggattccgccttgttggtctgaaattcatgcaagcttccgaagatcttctcaaggaacactacgttgacctgaaggaccgtccattctttgccggcctggtgaaatacatgcactcagggccggtagttgccatggtctgggaggggctgaatgtggtgaagacgggccgagtcatgctcggggagaccaaccctgcagactccaagcctgggaccatccgtggagacttctgcatacaagttggcaggaacattatacatggcagtgattctgtggagagtgcagagaaggagatcggcttgtggtttcaccctgaggaactggtagattacacgagctgtgctcagaactggatctatgaatgacaggagggcagaccacattgcttttcacatccatttcccctccttcccatgggcagaggaccaggctgtaggaaatctagttatttacaggaacttcatcataatttggagggaagctcttggagctgtgagttctccctgtacagtgttaccatccccgaccatctgattaaaatgcttcctcccagc

SEQ ID NO: 11 - DNA, 8461 bp, Homo sapiens
  Genbank Accession No. X75598
tgctgcgaaccacgtgggtcccgggcgcgtttcgggtgctggcggctgcagccggagttcaaacctaagcagctggaagggtaagaggtgttcgggatcctgagaggaaaaagaaaggagtgtagtcgcgggagtgggttaggtgaggagttagtgaagagatgagttcagctctaagaggcggcgaggaggatcggatgggaggaggggcagggagcgcctgtggacaagtgcaggccggtcggcgcacgtcccacgccacgtggactcgcctttgtcggtgccgcctttctcgtcagaccgcgacgacaggctgtgccttaatttgtgtctgtcgagagcagtaccgggcacggagttggcgctctgtaagtgcttgctgaataaatgacgggtgtgtgtgtcattcattcagcaagcgctgagtgcttactgttgtgtcaccgggaccgatgtggagggacatttttagggtgtatttctggcgctttagtcctgttttctcctggacaatttatgcttgccccgcaccccatcgtgcgattctccgcagtctttgggctttgtctctctctctttttttttttttggaagttgcagaatggtgataaatgattttctttgctcctattgactgctaggccctgtggctaggtaccatagagtctctacacaggagtaaatcagcctggtgtgcaggggaggcagacacacaaacaagaaaattggactacagtgcaaagatgctgtaagaagaggttaacctaaaggacaggaagatgggccaagagatggtgctactgtctactttagggatcgtctttcaaggcgaggggcctcctatctcaagctgtgatacagggtaggtcatgagcgcagtcttctgtaaaatgagggatctggacggaatagttactctctaggcttcctttcagtatgatgtcccgtatcagatattcctaatgtctgtagttctcccacaccccaccgtttattggctagtcaaaatattctttgcattgtaaagtgtagcataacattacaagaatggattaatgggttgggaattctgggttttggccttcattctggtgctgtggtcctgtttcctcatttgtaaaatgaagggggttgtaaagatatattctctaaaacccctaatgctatggctgtggcattaagtcaaactattatttcttactgctttgtaccggacatcactttcacattagtaaaacttttcatcagtgtagtttctcccaagcttgattattgagaaagatagtgccttgtttttaacatcctgtatcctagttccaccgcagtgtttggtacacagtagatgtttaaaagaagcttattaaatcaaatggtggccaggctcatggggctcacgcctttaatcccagcactttgggaggctgaggtgggcagattacttgaggtcaggagttggagaccagcctggccaacatggtgaaaccccatctctagtaaaaaaaaatacaagaaattagctgggtgtggtggcacgcacctgtagtcccagctatttaggaggttgaggtaggagaattgcttgcctgggaagttggaggtttgcagtgagccaaggtcgcaccactgcactccatcctgggcgaaagagcaagactccataccaaaaaaaaaaaaaaaatcaaatggggctgggtgtggtggctcatggccataatcccagcactttggtaggctgaggtgggcagatcacttgaggacaagagttcgagaccagcgtgggcaacatagcgaaaccccatctctaaaaaaaccccacaaaaaccaaaacaaatgaaaataaaataaatcaaatgggatagaaattatagtccttgcttttggatcctttcccacattgacatattagttcatagatcaggggactggggaggaattgggtttttaccagagggagacctggagctgacctgacagatttaaaccagctttatgggataatccgcttgagacggatgacgctgtaggcaagtgattcactgctgtttcattcctctacctgcctatccccagaaccatggccaactgtgagcgtaccttcattgcgatcaaaccagatggggtccagcggggtcttgtgggagagattatcaagcgttttgagcagaaaggattccgccttgttggtctgaaattcatgcaagtaagtggacttcattgttcccattttgattccttcatagtataggagaacactgtgattaacctgtttctccccgtctttcttatttaaagttctccacggtagagtgaacacaagtgtcttgagacctggaaactccccagtgccctagcgtttggctacatgcttggaacaaaccaagttatttaggatttcccaaaatagtctctgtaataggaggtgcattgctacgggaaaagcagtgcagagttccacatatgactgcatctctgtaatttctgactgagagctgagcatgtttgagttgttggtcttgagcttcctgagcagataattttagagagatttttttccccctttgagacaggttgttttttagcaagaaagtctttccatcatcaattactagacactaataaatgcttattgtttagcatatattaggtatcataggagctggtggaggaaaactatggtttgggtttgtggggaggtctctccagaaacagcagagagcagatgtacctgcaagctacttacaaagcaatcttttgataaatgcaaaggattgattgaccaataacccttctcaaacaaattctagagataatccaacttctcggctgggtgaggcatagtggctcaatacctgtaatcccagcactttgggaagccaaggcaggctggtcacttgaggtcaggagttcaagaccagcctggccaacattgtgaaaccccgtctctactaaaaatacaaaaattagctgggcatcagggtgggtgcctgtaatcccagctattcggcaggctgagacgtaagaattgcttgaaccagccaggtgcggtggctcatacctgtaatcctagcattttgggaggctgaggcgggcggatcacctgaggtcaggagttcgagacagcctgaccaatatgatgaaaccccgtctctactaaaaatacaaaaattagccaggcgtggtggcatgcgcctgtaatcccagctactcgggaggctgagacaggagaatcgcttgaactggggaggtggaggttgcagtgaccgagatcgcatcattgcactccagcctgtgcaacaagagcaaaactccatctccaaaaaaaaaaaaaaaaaagaattgcttttgaacccaggaggcggaggtttcagtgagccgatattgcaccacactgcagcctgggcaacagagggagggagactctgtctcaaaaaaaaaaaaaagaatcccaatcctcaaatcaaataggggatagtatggtttctaaaagggaatcaatttgggaccctcctagtgcattttaaaatttagtttgacttgcaatttacttcctatgtgatattttagaaaaactgctttagggctggcacagtgactcgcctgtcatcccagcactttgggaggctccgtctccaaaaaaaaagaaaaaaaagaaaagaaaaactgctttaatgtaaaagagggtagactgatgttcatgctgagaggagaatatggtgtccacggtcaaggagctggcatctaatgaaggttttcttgctgtatcatcccatgacagaatggaatagcaagagagtgcaagagtgagagagagagcaagagggggctgatgttgattttataacaaacccactcctgagataagacattaatctgttcatgagggtgaagccctcatgatctaaacacctcccattaggcctcacctcccaacattgttgcatcgaggattaaatttccaacatacgaactttgggggacacattcagatcacagcagagaggtaacatgagatggatgtgtgtgtgtgatcaggcatttaccatatgctgggcacatatgttttctgatttagtcttcatgccagccttgagaagtacttactcctgttctcgtggttgttagtgatgagcaacctaaggcttggagaggttcagtgatgtgcctgatagcatacagtgatgccactggaattttaacttgagtctctctgacccctgagtgcagatactttctcctttacattgaatttcctattaaggatatatgggtttggtgaagaatggacggaaggatagctgccatgactctaaaggggcatttaaatctggtgtggaggcaggaagcaagggagaacttgaggttcccaacccccaagcccttaaaaaaagcccgtgatctgttttgcagactaaagataatcagttagggcctggcgtggtggctcacacctgtaatcccagcattttgggaggtcaaggtgggtggatcatctgaggtcaggagatggagaccagccaggccaacgtggtgaaaccccgtctctactaaaaatacaaaatttagctgggtgtgatggcgcatgcctgtagtcccagctaccagggaggctgaggcgagaggatggcttgaactcgggaggtggagttgcagtgagcggagatcgagccactgcactccagcctgggtaacagagcaagactctgtctcaaaaaaagataattagccgggtgtagtggtgcacacccgtagtcctagctactgagaatctgaggcaagaggattgcttgagcctgggagtttgaggccgcagtgagctatgatcatgccattgcactccagcctgggtgacagaaagaccctgtctcaaaacaaacaacaaaaccaacaaaaagataattggaaccaattaatagaattaaaaaagtattctgataagggaaggtcacctcagggtctgttagacttccataacaaaagtcttccatttggataggaaaggacagggcgagggttggatccctaccacggagtgattatatggccatgtaattttactttggcaagtgatgataactggtggctgaatgatggggcttctgggcagccagtctccacatctgtgtgtgtctctgatgtgtgtgatatgcgtcatacagtgcagtaccacagagctggaaaaaccatgggaccctgttagattttaacaagcgtatatgcagtacaagagagaacacagccaaactgagttgaaactgctaagcagatggtttgttctctagctaacttgattcgcccccacatattagccttgcagtatgagaggttctaattcatttttcagcaaaattatttattactagatgtcatgcactttgggtgattggagatacctctgggtaatcacatggtcatcactgctgggcttttatcctctgattaacgtgaagcatccctgggtaatggctggttagttgctgctcagtaaatgccaagacttgcttccggttgtcctctaacattatagttggggtttgctctgggactggaaatttattgtattgttgattttcctgccaaaaatgagatagttgaggcccaggcatggtggttcacccctgtaagcccagcactttgggagccggagcctggaggatcacttgagtccaggagtttgagaccagcctggccaacatagtgagaccctatctctacaaataattttttaaaattacccaggtatgcctgggcgcggtggcttacgcccgtagtcccgcccctttgggagcccaaggcagacagatcacctgcggtcacccgagaccagcctggccaacagtggcgaaactctgtttctactaaaaatacaaaaattgcccaggcatgatgccccccacctgtaatcccacctacttgggagtctgaggcaggagaatcacttgaacccaggaggtggaggttgcagtaagtcaggatcacgccactgcactccagcctgggtgacagagggagactctgtctcaaaataaataaataaataaataaaattagccaagtctggtagtgtgtgtctacagtcctacctactcgggagtctgaggcaggaggatcacttgacccaggagtttgattttttttttaaatgagatagctggatttaattttaatgttctgtggttttattatcagtcagtgccaatagggagacaactgatataaaattggagaagtacatttagtcctgtcactgctcccttccagtgtggagaatgaattgggttataacagaatcagtgagcccaaccgctcatgttttacatagcagggtggatgaggggaaattaaatggattatatgtccttagatggtttgggggttattctcattctctgtcctgttgaataggcttccgaagatcttctcaaggaacactacgttgacctgaaggaccgtccattctttgccggcctggtgaaatacatgcactcagggccggtagttgccatggtgagtgtgcctgtgtgggatactccaagtatgcattgcttgtcatctgtgctaggctctcttctagacactggggatacagccatgaatgagaccaaatagatacctgttttcatataccagctaatggttagtgataggcttcagaaatgaaatatgcccagaaatgaataggagtagcaaatgatcactttagattgggtgatcaaagaacgcaatttttaagctgtgatctgaatgacaagaagcagcgatctgaatgacaagaagcagccagccatgtacagaatcacagtgaaaaacatttccagccaagcaaacagcatgtgcaaaggtcccagggtgggaatgagcttggctttttgaagtacgggaggagagttgaaatgcccgaagcctgatgggtgggagggaagttgggaggtgaagagttcagaggcatgggcaggggccttctctcttaggggtgtgttgaccatatacttcctgagtgctgggaagctatgggacacttcacacttggcatttcttttttttttttttttgagacggagtcttgctctgttgcccaggctggagtgcagtggtgccatctcgtctcaccgcaagctccacctcccgggttcacgccattctcctgccttagcctcctgagtagctgggactacaggcgcccgccaccacgcccagctaatcttttcgtgttgttagtagagacagggtttcaccatgttagccaggatggtctcgatctcctgacctcgtgatccactcccctcagcctcccaaagggctgggattacaggcgtgagccactgcgccctgcccacacctggcattttaaggaggctgctctggttgctgtatggagaatacattgtagaaaggcaagcatgagggcagggagatcaggatccccgatcctcagtgctggaataagtggatatactctataaacatttgttcagtgaatgaatataatcttaaggggcctttttatttttccttttttgaattaatagttgccagattttctgctgtgattggttttcttctttgaccatatcttcttctgtccttggaggtctgggaggggctgaatgtggtgaagacgggccgagtcatgctcggggagaccaaccctgcagactccaagcctgggaccatccgtggagacttctgcatacaagttggcaggtgagattttggtatttttcccccttttccaaaatctgatttagttgccacaaggatttgggtttccgaggctggaggtagacatgataccatatgcaggttgattttatcggagtttattgttttcctccctcttaagttggcgtttggctttggttgttaacatcacttagtcgtacctctgttacacgaagtgtagaacctggtacgacacactttggtggcagtctttcctgaaggctctcactgtttggaacagcgttgccgggagggctggatgtggggagggcatttttcagccttaagtgaatggccattgtaggcttttcttttaacatggtctaatgtccatggagcttcagcttttatgctgctgtggctgtagatttctggcaatgggcgcatattaatccttctggtcttggtcatgtgactatctctttctccacccaggaacattatacatggcagtgattctgtggagagtgcagagaaggagatcggcttgtggtttcaccctgaggaactggtagattacacgagctgtgctcagaactggatctatgaatgacaggagggcagaccacattgcttttcacatccatttcccctccttcccatgggcagaggaccaggctgtaggaaatctagttatttacaggaacttcatcataatttggagggaagctcttggagctgtgagttctccctgtacagtgttaccatccccgaccatctgattaaaatgcttcctcccagc

SEQ ID NO: 12 - DNA, 780 bp, Homo sapiens
  Genbank Accession No. AL360191
gcgtgcgtgcaagtgctgcgaaccacgtgggtcccgggcgcgtttcgggtgctggcggctgcagccggagttcaaacctaagcagctggaaggaaccatggccaactgtgagcgtaccttcattgcgatcaaaccagatggggtccagcggggtcttgtgggagagattatcaagcgttttgagcagaaaggattccgccttgttggtctgaaattcatgcaagcttccgaagatcttctcaaggaacactacgttgacctgaaggaccgtccattctttgccggcctggtgaaatacatgcactcagggccggtagttgccatggtctgggaggggctgaatgtggtgaagacgggccgagtcatgctcggggagaccaaccctgcagactccaagcctgggaccatccgtggagacttctgcatacaagttggcaggaacattatacatggcagtgattctgtggagagtgcagagaaggagatcggcttgtggtttcaccctgaggaactggtagattacacgagctgtgctcagaactggatctatgaatgacaggagggcagaccacattgcttttcacatccatttcccctccttcccatgggcagaggaccaggctgtaggaaatctagttatttacaggaacttcatcataatttggagggaagcttttggagctgtgagttctccctgtacagtgttaccatccccgaccatctgattaaaatgcttcctcccagcaaaaaaaaaaaaaaaaaaaaaaaaaaaaaaaaaaa

SEQ ID NO: 13 - DNA, 745 bp, Homo sapiens
  Genbank Accession No. AL360166
agggcgaaccacgtgggtcccgggcgcgtttcgggtgctggcggctgcagccggagttcaaacctaagcagctggaaggaaccatggccaactgtgagcgtaccttcattgcgatcaaaccagatggggtccagcggggtcttgtgggagagattatcaagcgttttgagcagaaaggattccgccttgttggtctgaaattcatgcaagcttccgaagatcttctcaaggaacactacgttgacctgaaggaccgtccattctttgccggcctggtgaaatacatgcactcagggccggtagttgccatggtctgggaggggctgaatgtggtgaagacgggccgagtcatgctcggggagaccaaccctgcagactccaagcctgggaccatccgtggagacttctgcatacaagttggcaggaacattatacatggcagtgattctgtggagagtgcagagaaggagatcggcttgtggtttcaccctgaggaactggtagattacacgagctgtgctcagaactggatctatgaatgacaggagggcagaccacattgcttttcacatccatttcccctccttcccatgggcagaggaccaggctgtaggaaatctagttatttacaggaacttcatcataatttggagggaagctcttggagctgtgagttctccctgtacagtgttaccatccccgaccatctgattaaaatgcttcctcccaaaaaaaaaaaaaaaaa

SEQ ID NO: 14 - DNA, 3081 bp, Homo sapiens
  Genbank Accession No. AF038633
gagctctgggatggcactagaatttgagccagttgtcctttagtgcaagccacacaggcccttcatagggtgctgaaagggctgggtgtcgtggctcacacctgtaatcccagcactttgggaggccgaggtgggtggctcacttgaggtcaggagttcgagaccagcctggccaacatggtgaaaccctgtctctcctaaaaatacaaaaattagccaggtgtggtggagcacacctgtagtcccagctacttgggaggctgaggcacgagaattgattgaacccgggaggcagtgagccaagattgtgctactgcactccagcctgggcaacagaggagactccatctcaaaaaaaaggtgctgaaggaaagagacctaaacctgccaatcctttgtcatgatccctccattgccatttcatgctcccatctccagcccttgctcactgcttagccttcctcctcttcatcgtgttattcctgttccttaggttggccgttgtccaatgtgttgctgttatctggaactcctacctgtcctggaaggcacatcggctctaagcctgcctcactccatcgtttccaccttgcagtgatgcagcttgaccctggaacggtcagacaacctcctcaaagtgggcataccagtttccacggggttgggttgccggtcagagcttaagaggactagcaccctgcaatgcccctcttcactctaaaatgtacactgactgctttagagcccttgataatagtcttattcccaccacatactaggcactccataaatatctgttgaaccttcatgaccttatcaactttacacccatatcccagcaaatgccactcatccccactcttcatagacacatttgttactctaaccctgcctaggcttcttgtagctccagctctttagagactcccggaaccctttatatggtgcctcagtaaatatgttattaaatatgtaatccggaatctgcagtggtaatgagtaagtttttaagcagaaaactattggggagtcatttctagagctggaaagaagccaagagaccaccaagcccaattttttttttttttttttttttttttttttttgagacagggtcttgctctgtctcccaggctggagtgcagtggcgcgatcttgcctcactgcagcttccgcctcctgggttcaagcagttctcctgcctcagcctcctgagtagctgggaccacaggcgcataccgccacgcccggctaatttttgtatttttagtagagatggggtttcgccatattggccaggctggtttcaaactactgacctcgtgatccgcctgcctcggcctcccaaagtgttgggattacaggcgtgagccaccgcgcctggccaagcccagtcttacaaatgaggaccctgaggttggtaggagggaggtgacctgtccacaccaggagttagcagaaacttgaacccatatttctttgctgctcatgggcagagttacactgctgctatgattcccaggagagaaactgaactttgctaaactactttggcaaactcaaaagcagatgggccagccatttgtggtctgaaagcactcggatgctagagaccctctgttacatggtgcctgtcagacagccctacaatttggatcctggggctggaaaaagataagaatgctgggagactttggttgtggcagactgcctctcagtgggtcccactgtgttggctgagtgccagcggtggactcctgatgcctgcatttgcagaactgatagctgcagggaggcagtgggttccagcggcacagcgttctcacatttctggccacttctagaggcagaggacggggtcagcaccatggacagcctcacggtcccgcctccctttcgtgtgtcagaacacgcgacccggactagtctggtctggggacggccctagtcattgctggctgttctaagcggggcgagggactcccgtgggtcccagagcagtctttacgccccagccggcttctcgctttcctgcgtccagtgctgcttccagcgctagccccaggggcacgaaggctggtgtagggaggtgcgcccctccgggggcccgccagccgtcagactcgaagctgtggctgtcattgcttctacaatcagtgcatgttcttcgctgacgtcagtcggagctgtcctggcactatataaggctggcgacagccccgggacagaccctgtgttccccaaggcgtcttcagcctgccccgagggacagagactggagctcaatcttggaccgtacagacgctcgccgacaacctgtgagtggctcagagcgtccgcccagcctccccctgcaccaggactccgctcagctcagccaccacgctcctccggggagggaggctgggtggaagggatggaacagcactggcgcagtggctggggctggagggcaggctgcgggcattgggcggcggccggaggggtcgccgggcgagcgcggggaggggagcggcggcctgcagctgtcccaggcgcacctcaccctgcgctgcccctgtgtgtccagggccggcggcaccatgaggcaggcgggacgcgcagcgctgctggccgcgctgctgctcctggtacagctgtgccctgggagcagccagaggagccccgaggcggccggggtccaggacccgagtctgcgctggagccccggggcacggaaccagggtggcggggcccgcgcgctcctcttgctgctggcggagcgcttcccgcgccgcgcggggcccggccgattgggactcgggacggcaggcgagcggccgcggcgggacaacccttctctgtccattgacctcacctttcacctgctgcggaccctgctggagctggcgcggacgcagagccagcgggagcgcgccgagcagaaccgcatcatattcgactcggtgggcaagtgatggcccggtttggggctgcgaaaacgttgacccctttcccccaccccagagttgggatgcggggcagagccaccagggcactgtctgcgtgactattttttaataaaagtactgaagacccgtt

SEQ ID NO: 15 - DNA, 974 bp, Homo sapiens
  Genbank Accession No. X76538
gtgggagggaggctcggcgctcaggaagcatggcactctggcgggcataccagcgggccctggccgctcacccgtggaaagtacaggtcctgacagctgggtccctgatgggcctgggtgacattatctcacagcagctggtggagaggcggggtctgcaggaacaccagagaggccggactctgaccatggtgtccctgggctgtggctttgtgggccctgtggtaggaggctggtacaaggttttggatcggttcatccctggcaccaccaaagtggatgcactgaagaagatgttgttggatcaggggggctttgccccgtgttttctaggctgctttctcccactggtaggggcacttaatggactgtcagcccaggacaactgggccaaactacagcgggattatcctgatgcccttatcaccaactactatctatggcctgctgtgcagttagccaacttctacctggtcccccttcattacaggttggccgttgtccaatgtgttgctgttatctggaactcctacctgtcctggaaggcacatcggctctaagcctgcctcactccatcgtttccaccttgcagtgatgcagcttgaccctggaacggtcagacaacctcctcaaagtgggcataccagtttccacggggttgggttgccggtcagagcttaagaggactagcacctgcaatgccctcttcactctaaatgtacactgactgctttagagcccttgataatagtcttattcccaccacatactaggcactccataaatatctgttgaaccttcatgaccttatcaactttacacccatatccagcaaatgccactcatccccactcttcatagacacatttgttactctaaccctgcctaggcttcttgtagctccagctctttagagactccgggaaccctttatatggtgcctcagtaaatatgttattaaatatgtaatccgg

SEQ ID NO: 16 - DNA, 1238 bp, Homo sapiens
  Genbank Accession No. X07577
tccttacccaggtcctgctcggggctggggagaacaccaaaacaaacctggagagcatcctctcttaccccaaggacttcacctgtgtccaccaggccctgaagggcttcacgaccaaaggtgtcacctcagtctctcagatcttccacagcccagacctggccataagggacacctttgtgaatgcctctcggaccctgtacagcagcagccccagagtcctaagcaacaacagtgacgccaacttggagctcatcaacacctgggtggccaagaacaccaacaacaagatcagccggctgctagacagtctgccctccgatacccgccttgtcctcctcaatgctatctacctgagtgccaagtggaagacaacatttgatcccaagaaaaccagaatggaaccctttcacttcaaaaactcagttataaaagtgcccatgatgaatagcaagaagtaccctgtggcccatttcattgaccaaactttgaaagccaaggtggggcagctgcagctctcccacaatctgagtttggtgatcctggtaccccagaacctgaaacatcgtcttgaagacatggaacaggctctcagcccttctgttttcaaggccatcatggagaaactggagatgtccaagttccagcccactctcctaacactaccccgcatcaaagtgacgaccagccaggatatgctctcaatcatggagaaattggaattcttcgatttttcttatgaccttaacctgtgtgggctgacagaggacccagatcttcaggtttctgcgatgcagcaccagacagtgctggaactgacagagactggggtggaggcggctgcagcctccgccatctctgtggcccgcaccctgctggtctttgaagtgcagcagcccttcctcttcgtgctctgggaccagcagcacaagttccctgtcttcatggggcgagtatatgaccccagggcctgagacctgcaggatcaggttagggcgagcgctacctctccagcctcagctctcagttgcagccctgctgctgcctgcctggacttgcccctgccacctcctgcctcaggtgtccgctatccaccaaaagggctccctgagggtctgggcaagggacctgcttctattagcccttctccatggccctgccatgctctccaaaccactttttgcagctttctctagttcaagttcaccagactctataaataaaacctgacagaccat

SEQ ID NO: 17 - DNA, 528 bp, Homo sapiens
  Genbank Accession No. X07433
tttgccctagaattcttcgatttttcttatgaccttaacctgtgtgggctgacagaggacccagatcttcaggtttctgcgatgcagcaccagacagtgctggaactgacagagactggggtggaggcggctgcagcctccgccatctctgtggcccgcaccctgctggtctttgaagtgcagcagcccttcctcttcgtgctctgggaccagcagcacaagttccctgtcttcatggggcgagtatatgaccccagggcctgagacctgcaggatcaggttagggcgagcgctacctctccagcctcagctctcagttgcagccctgctgctgcctgcctggacttgcccctgccacctcctgcctcaggtgtccgctatccaccaaaagggctccctgagggtctgggcaagggacctgcttctattagcccttctccatggccctgccatgctctccaaaccactttttgcagctttctctagttcaagttcaccagactctataaataaaacctgacagaccat

SEQ ID NO: 18 - DNA, 1801 bp, Homo sapiens
  Genbank Accession No. M13656
ccagaagtttggagtccgctgacgtcgccgcccagatggcctccaggctgaccctgctgaccctcctgctgctgctgctggctggggatagagcctcctcaaatccaaatgctaccagctccagctcccaggatccagagagtttgcaagacagaggcgaagggaaggtcgcaacaacagttatctccaagatgctattcgttgaacccatcctggaggtttccagcttgccgacaaccaactcaacaaccaattcagccaccaaaataacagctaataccactgatgaacccaccacacaacccaccacagagcccaccacccaacccaccatccaacccacccaaccaactacccagctcccaacagattctcctacccagcccactactgggtccttctgcccaggacctgttactctctgctctgacttggagagtcattcaacagaggccgtgttgggggatgctttggtagatttctccctgaagctctaccacgccttctcagcaatgaagaaggtggagaccaacatggccttttccccattcagcatcgccagcctccttacccaggtcctgctcggggctgggcagaacaccaaaacaaacctggagagcatcctctcttaccccaaggacttcacctgtgtccaccaggccctgaagggcttcacgaccaaaggtgtcacctcagtctctcagatcttccacagcccagacctggccataagggacacctttgtgaatgcctctcggaccctgtacagcagcagccccagagtcctaagcaacaacagtgacgccaacttggagctcatcaacacctgggtggccaagaacaccaacaacaagatcagccggctgctagacagtctgccctccgatacccgccttgtcctcctcaatgctatctacctgagtgccaagtggaagacaacatttgatcccaagaaaaccagaatggaaccctttcacttcaaaaactcagttataaaagtgcccatgatgaatagcaagaagtaccctgtggcccatttcattgaccaaactttgaaagccaaggtggggcagctgcagctctcccacaatctgagtttggtgatcctggtaccccagaacctgaaacatcgtcttgaagacatggaacaggctctcagcccttctgttttcaaggccatcatggagaaactggagatgtccaagttccagcccactctcctaacactaccccgcatcaaagtgacgaccagccaggatatgctctcaatcatggagaaattggaattcttcgatttttcttatgaccttaacctgtgtgggctgacagaggacccagatcttcaggtttctgcgatgcagcaccagacagtgctggaactgacagagactggggtggaggcggctgcagcctccgccatctctgtggcccgcaccctgctggtctttgaagtgcagcagcccttcctcttcgtgctctgggaccagcagcacaagttccctgtcttcatggggcgagtatatgaccccagggcctgagacctgcaggatcaggttagggcgagcgctacctctccagcctcagctctcagttgcagccctgctgctgcctgcctggacttgcccctgccacctcctgcctcaggtgtccgctatccaccaaaagggctcctgagggtctgggcaagggacctgcttctattagcccttctccatggccctgccatgctctccaaaccactttttgcagctttctctagttcaagttcaccagactctataaataaaacctgacagaccat

SEQ ID NO: 19 - DNA, 18687 bp, Homo sapiens
  Genbank Accession No. X54486
gatcctcctgcctcagtctcctaaaaggctgggattacaggtatgaacccccaggcctgcctacttcgtgtgttttatctggcaatgctgagaggacagctagatgtcgaggacagccagatttcgaggacagccagacgtcaagggggaaagcaacttgctggctcacacagccagccaggtctattgtggagccctagtcgcaaacacatacaccccagctttcaagtttttaaatatttatttagttagttatttgttttttgagacagtcttgctctgtcacccaggctggagtgcagtggtgcaatttcagctcactgcaacctctgcctcccagattcaagtgattgctgcctcagcctccctagtagctgggactacatgtgcgcgcctgcactgcccagctaatttttgtacttttagcggaaacggggtttccccatattggccagagtggtctcaaactcctgacctcaagtgatccacccacctcggcctcccaaagtgctgggattacaggcgtgagaccgtgcccggctagctttttttttttttttttttttaattaggttgaatgcttgttgagctgggtgcctcacatccgttgtctgttatacaaagaactactgattatgggtctctacgagacaaaaatggcagaacacctacagggcacaggggagatgggagcagggattaggcttcagaatacttctccaaatgagggtgatcagggcccgacatttcactgctctaaggctcagtatcttaactatcaaatgggtacaatggggcacaaagggttactttgaggaataacggaggtgagcaatttccaaaaagttcattcctttaaaaactgcggagcacattttgtgtacatgctgtttttattgttactcatgaagacgcgggggaagctttggttgtgtaaagctgagaactgcacccaagcttccccgttcaccccacctaccaggggatttgggctaaattcctggcctggcccacaaagaagaccaagcggtcagtcccattccgtcccatcctgatttacaggaactcacaccagcgatcaatcttccttaatttgtaactgggcagtgtcccgggccagccaatagctaagactgccccccccgcaccccaccctccctgaccctgggggactctctactcagtctgcactggagctgcctggtgaccagaagtttggagtaggtttggtgctgggcaggggtggggagtagggtggaaagcatggagtgaagaggtctagggagggggtctcctcacccccgccttcctgcccgccttgatctcgggggtctctataggcttgcttccacctgggacttctgcctcctcctaccccagcccctcccgcctcaggcctgttgtgctcagccccccaggacctcccctcccccacgcctctggcctcattgtttggttaaagcaggaccccctccccctcccaccacctcccctccgactgaacagatggacagagacccgggcccacggggagaggaagggccagccggtgccgggaaagggaagcggtttggggaaaacaaaacagagggaggagccagggagaaggtggccccaggagggaggaggagggaattcgctaagagggactggggcctgagacggaatgggggcgggccccgggcggggtgggggcccctgggctcccagggtgggagctggctccgaggctggctggctccgcaggtccgctgacgtcgccgcccagatggcctccaggctgaccctgctgaccctcctgctgctgctgctggctggggtatgtggtcccttgtgggatgggggacgggggtggagacgggaggcgggatggtgcggggtgcgggcggtggctgaggattaacccttcaggctccggggaatgaggagagctcctcttgggatcattgagtgtgatccttgcacacgcactcgtagatggtggaaagagctcaggactcagacagatgcaagttctaatcttggcgggccatgtaggagctgcgcacgtggtcctgaggacgtcacttttctcagcctactcctcctgatttataaaatgttgaataaacagatcccaccctgtccaccaagcaggcttggcaggaggatcacatagggcaaggagatgggaagcattttgtgatatcaaagcaagagtttgttgtagaaaagagctgtggggaggagaggtttggctgctgtgacacagacggtggtcccaggctagggcctgtgaagacagggaagaatggtagcaaacatacgtgggtctgggtgggggtcaatagcagtgagaggtcccagtggtctgggaggtcatggactagaaataaggctaagaagtgcaggatcccaggagaaaggtaggtaggggtgtgtgtatgtgcgtgtgtgtgtgtgtgtgcacgcgcaagttggtatcacatactcagcagatgatgtagttatgagcagggagtttggaatcagagaccttgttttgacccctagctgtttctcccatttctgtgagaccctggactagttaatatgtgtcggtatgagtttctctacctgtgaaatggagctaatgcgtggtttctcagtggaggatctgttgacattggggctggataattcattgctgaggggctaccctgtgcattttaggatgttttgcagtatatctctagcctctacgcactagattccggtagcatcttccctgctgtctccctgtgacaaccaaaaatgtctctggacattgccaaatatcccctgggagtcaaaattgtttcagagccgctggcctatactacttctctctccctcccttcctgcctcccttctttcctccttccctttcttcgttcccttcctaatgtgtactgtttttccacacccactaatgggttgcaacccacagtttaaaaatttactgttctaaatcaaggagcacaagttcaaatgtctgtactagccaagcaagtgagtcaaacaggtagatatttacaggaaattgcaagaacatagataaatgacaacactcagcttcactgtttggaaaacaacttcctacagggcagtaattggtcagagattacagagtccctgactatccctcatcttctgcagagcacattcctgtgcacccccaccctcaccctgtattgccccttctctgaggaattagtggtggtggttctaagacagattgctcatctgctgcactgtcagaaattactctcttgtacaggacattttccacatccacaccttctcttcctgctttgagtattttagaggactgtgcctcgtagtaagaaaaaaatgaaactcagtttcttgaaccacaggatagagcctcctcaaatccaaatgctaccagctccagctcccaggatccagagagtttgcaagacagaggcgaagggaaggtcgcaacaacagttatctccaagatgctattcgttgaacccatcctggaggtttccagcttgccgacaaccaactcaacaaccaattcagccaccaaaataacagctaataccactgatgaacccaccacacaacccaccacagagcccaccacccaacccaccatccaacccacccaaccaactacccagctcccaacagattctcctacccagcccactactgggtccttctgcccaggacctgttactctctgctctgacttggagagtcattcaacagaggccgtgttgggggatgctttggtagatttctccctgaagctctaccacgccttctcagcaatgaagaaggtggagaccaacatggccttttccccattcagcatcgccagcctccttacccaggtcctgctcggtaagaccctgcttgaattctctccaggtcatttgttggacactcccataagagtcaccaatccagacacttacaaagccatgcctctgggaagaagctgtaaaaatgggctattatatattgggggtggggtagagggatgtatcttttcattcttgaacattccatcatttcacagtgatgtaataggcacgattgcttgtaaaactctgtgactatacaagaacatataaaataaggtcgcagccactaaccatgtttcatggcaaggagaggtgataagaaagatgaaattaggcgcagtggctcacgcctgtaatcccagcactttgggaggccaaggcgggtggatcacctgaggtcaggagttcaagaccagcctggccaacatggtgaaaccctgtctctactaaaaatacaaaaattatcagggagtggtggtgcatgcctgtaatcccagctacttgggcagctgaggcaggagaatcgcttgaacccaggaggtggaggttgcagtgagccgagaccgcaccattgcactacagtctgggtgacagagcgagactctgtctcaaaaaaaaaaaaaattatcagagatagacctagagtagatgtggttagtactgccttctagctctgtgaccttgggcagatcactttaacctctctgagccttgagtcctcttgtgtaaaatagtgatgatgctatctacctcaaaagattaagaagcagaaagccaggccgggtgcggtggttcacacctgtaatcccagcattttaggaggccgaggagggcagatcacgaggtcaggagttcgagaccagcctgactaacatggtgaaaccccgtctctactaaaaataaaaagaaattagctaggcatggtggtgcacacctgtaaccccagctactcaggaggctgaggcaggagaatcacttgaacacgggaggcagaggttgcagtgagccgaaatcatgccactgcactccagcctgggaagactgagcaagactctgtctcaaaaaaaaaaaaaagaagcagcctagtgtctgacttagtgggaggtcaaaaaaatgtaaatcctctgccatcttgagggattactgtcaagtcccatttggtaattaccctaggaatggcacaaacaaattactacaagcagtggggacagagctattactccccagagagaattctaaaaaggctacagaatctttcttggctgggcacggtgactcacacctataatcctggcactttgggaggccaaggcaggagttcaagaccagcctggccaacatgttgaaaccccatctctactaaaaatgcaaaaattagccaggcatagtgatgcatgcttattgtcccagctacttgggaggcagaggtgggaggattgcttgaacctggagattcaagtgagctgagattgcaccactgcattccagcctgggccaacaaagcaagactctgtctcaaaaaaaaaaaaaaaaaaaaaagagagagattgagagaacattccagctcagatgatctgtgatcccctccaaagcagggaataccctccattccagcctggtccccaaccctcattcccaaggaaggcccccgactcatcctgcaagtatctttcatctctgccctttgttgcaggggctggggagaacaccaaaacaaacctggagagcatcctctcttaccccaaggacttcacctgtgtccaccaggccctgaagggcttcacgaccaaaggtgtcacctcagtctctcagatcttccacagcccaggtgagtgcccaggaatgggcagtgtctgcagaggagggtcctgagaggactctgaagggggacccagcgctggggaaagaaaggacagagggaatgttggagctacagtatcagggatggactgcagagcaggtgaagaccttggcaggagcattaggtcactccaggaactagactgttcttctaatgagaccttagacaagtctctggcattcatcaactgctttagaataaaaataaccgggcaggtacagtaaaatagtgatgatgctatctacctcaaaagattaagaagcagaaagccaggctgggcgtggtggctcacacctgtaatcccagcactttgggaggccgaggcaggtggatcacgaggtcaggggttcgagaccagcctgaccaacatggtgaaaccctgtctctactaaaaatacaaaaattagctgggcatggtggcgggcacctgtaatcccagctattcaggaggctgaggcaggagaattgcttgaacctgggaggcggaggttgcagtgagccgagatgacgccactgcactccagcctgggcgacagagcaagactccgtctcaaaaaaaaaaacaaaaacaaaacaaaaacaaaaaaaaaaaacaaagaaggagaaagccgggccgggcatggtggttctcatctgtaagttcaaggagttgaaggtatgctaggactttgggaggccaaggccttcaagaccagcctgggcagcatggcgaaacctgtctccattaaaaaaaaaaaagttgggggtacggctgggcatggtggctcacacctgtaatcccagcacttttgggaggctgaggtgggtggaacacctgaggtcaggagttcaagaccagcctggccaacatggcaaaaccctgtctctattaaaaacacaaaaattagcctggcatggtggcaggcgcctataatcccaactactcaggaggctgaggcaggagaatcgcttgaacccaagagagtgaaggttgcagtgagctgagatcatgccacttcactccagcctgagtgaaacagcaaaactctgtctcaaaaaaaaaaaaaggaagaaagaaaaaaggccaggcgcggtgactcacgcctgtaatcgcaacactttggcaggccgaggcaggcgattcacaaggtcaggagttcgagaccagtctggctaactaacatagtgaaactccgtctctactgaaaatacaagaaattaccctggcatggtggtgtgcacctgtaatcccagctactcaggaggctgaggcaggagaatcgcttgaacctgggaggcagaggctgcagtgagccgagatcgcgccactgcactccagcctggatgacagagcaagactctgtctcaaaaaaaaaaggccgggcgcggtggctcatgcctgtaatcccagcactttgggaggctgaggcgggcggaccacgaggtcagaagatcaagaccatcctggctaacaagatgaaaccctgtctctgccaaaaaaatacaaaacttagccgggcatggtggcaggcgcctgtggtcccaactacttgggaggctgaggcaggagaatggcatgaacccgggaggcggagcttgcagtgagccgagattgcgccactgcactccagcctgggcaacagagcgagacaccatctcaaaaaaaaaaaaaaaaaatggggcgggcgggccaggcgcggtgtctcacacctgtaatcccagcactttgggaggctgaggtgggcggatcacttgaggtcaggagttcaagaccagcctggccaacaccaggaaaccctgtctctgttaaaaatacaaaaattagccaggtgtggtggcacgcgcctgtagtcccagcaggagaataacttcaacctgggagacagaggttgcagtcagctgagatcgcaccactgcattccagcctgggtgacagaccgagactctgtctcaaaaaaaaaaaaaaagaagaatacccatatgcattcattaatatatagggctagagggctagagagctatagacataaaatagacaaaaaatttttttgctcatttttgggtcaaaggagtcttgggactctaattcttttaatttttgtgttatgtgaatttgttatcatttacatgtattatgttattaagtaggtaataatgataatactaataataaacttacaaaacgatccaatgtagttgttttcagactttgttcctcggagccctaggactttgcaaagctgtttctggagtcatggtgggagtggggtgtggggagcctgagcagtggggaagggttcaccacttcctgtgagagggaaacggaccagctgggctctgagctccccacccagcctcagccagggtccattttatattgtgggcttcagacatgcctttgtttgaaagcagttctgctgctttaaaatgtttgataaccattgaactaatctacccacctccctttttaaaaaaaaaaggaaaacttttttttaagctgttttttttgttttttgtttttttttaaactgtaaaaacaatacttaggtctggctcagtgtgcctgtaattccaacactgagaggctgaggtaggaggattgcttgaggctagaatttcgagactagcctctgggcaacatagacagacctcatctctacaaaaaattttaaaaattatccgggtgtggtacgtgtctgtagttccagctatgaaggactgagacgggaggattgcttgagccaagaattcgaagttagagtgagctatgtttatgcctctgtactctaggttgggtaacagagtaggaccctgtctctaaaaaaaaaaaaatttaatttaaattttaaaaactcacctatcaccccatcatctgaaaaacaccctctttcagatgtgggaaaaacatggctcagaggtgttcaagaaatgttgcatttatttattacttacaaagctgtaagtcagctttatccgctgtcttgctaggttggtgaaaaatacgtaacagcattcaatattagggcttctatccccatctagctgcacactggagctgtgccaagcaaggttcttggtcttatgttgtacttaggcatcagcaaagcctgggaaaatatcttttttttttttttgagacagaatctcgctctgtcgcccaggctggaatgcagtggcaccatctcagctcactgcaacctccgtctcccagattcaagtgattctcctgcctcagcctcccgaatagctgggattacaggctggtcttgaactcctggcctccagtgatccacccaccttggcctcccaaagtgctgcgattacaggtgtgagccaccatgcccagctggggaaaatatctttaatctacttagtcctagaaaaattatctttcaagtgctttttttttttttttttcagtggactgaaggcttttgcagagcaaaagccaggaagttttgtcacaaacttccaccaaggccaggaagcagagtctattccgtgccaaaattaagggaagaaaagagggaaaatctaggcaaatggaatttaatatctcaaaaagattatcttgccgagccatagtcacatagcaagctgaggcagcggaggcttggggctacttctcttgttcttggttctgggtttaccttctttgggccttatttgccacatctgtaagaggagtgggctggaccgcgctccaccatgccgtattcactaagtgagcagatagaaccatagaaagcatgctcactctcaaatcgtgctcatggaaagaacgacgtgttcaggactcatgcctccctttctcaacatacccccagacctggccataagggacacctttgtgaatgcctctcggaccctgtacagcagcagccccagagtcctaagcaacaacagtgacgccaacttggagctcatcaacacctgggtggccaagaacaccaacaacaagatcagccggctgctagacagtctgccctccgatacccgccttgtcctcctcaatgctatctacctgagtggtaagggtgcccttagccagttagtcttcccattctgggtccttcttcccctcctggcttcaaagcccacttaaccccaagttctacaatcggatctcaatgtccctgcactactctttgctaacaaggcttttagctcctcttcatccttttcctacctgcattagagcaaccctcccacctcttccctctagccaagtggaagacaacatttgatcccaagaaaaccagaatggaaccctttcacttcaaaaactcagttataaaagtgcccatgatgaatagcaagaagtaccctgtggcccatttcattgaccaaactttgaaagccaaggtaagttcttaacctttccttctcctgtttgaaacctacttgagtctcctgactttttttctgctgtagtcccatcattttggggtacatgcttacaaattcatcacttctactccttccatctgtatttccaccctatcttttctccttctcctttctctagccttggccaaggcagacattgtatattttaggctggaaacaggattctcaagtttcttcatgcatctctactatattgaatggcaaaatgtgagtcgtgttcctattctacacatctgtttctttttccagtcaactcatcagaagactctggtggcttagcaagtcctgtgtgtatgtgggtacctgtgtacagcatacatatacatgtgtagacgtgtataagtatatccttgtatatgcatatatgtggtaagtgcatgtgtgcacatgagttaaatggcttaagtgcattagcagaaattgaacaatttagtttgatgagtagggagggagagaagacagaatatggagcccagaggatcccaactggcaagctatctcatccccagttaccagatatttccacctttttaggatggcaaaacacagacctatgagacagaaaacagtaagagacaatgtctcaatacctggctgagaaacaaaggctctgttcttggaacatgctaggcttggttccacattgggagctttccttagcttttgtttctgcctgtatccctcttcactcagatcctcacatagcttgttccttcttgtcatttgggtgtcagctcagaggtcaccttggtggagaagtcttctccccattaaagcagcctcctcctcaccctgtaatatcactcctgttttattatattcattacactcatcaccatctgaaattatgtcatttatttgcttatttgcctaggacattgtctgtctccctaagatactgtctctctacttgaatacaggaacctgtcttgtttccttctgtatctgtagtgcctagaacaatgcctcctatcataggtgctcattcagtgtttgctgaataaatgaatgaatgaaatagagggtgccaaagagagctactcagtaaaagtggctggaagacttcatagaggagggtttttttcgagacagggtctcactctgtcactcaagctgcagtgcattgacatgatctcagctcactgcaatctctgcctcccgagttcaagcagttctcctgcctcagcctcccaagtagctgggactacaggagcccgccaccacacctggctaatttttgtatttttagtagagacggggtttcaccatgttagccaagctggtctcgaactcctgacctcaagtgatccacaccctcagcctcccaaagggctgggattacaggcatgagccacagcgcccagctgaggaggttatttttgaccattctttgctcagttatttatccactcatggacttatccacccatctatccatccctatctaatgtatttgaccattcatgactcatttagcagaaccaggacagcctgtataaggcacagaagagtgaatatatgtgacaggtccagagcattgttcaaattcaagatacgttgggggaggtataaatatgagatttttttcaaatcaattggaatggctatttaatcaaagccatagatgttaggtggaaagtaggaattaagaacttaacaagttaggtttaaatgtaactattcgaattataagaacaagtatttcctctctaaaaatgtttttaaagtttcacacaaaactctaaaccaaaaatcattgtaaaaatcccttggagtagactgttgaaaccattgaggtgaggtgataggttaaggtgagcattctggacatataatatcaataataaatattcaaatacaaagcaggtataatatgaagagtaatttctatctccccaagccaatatgagttttgtttgtttgtttgtttttcttttgagataaagtctcattctgttgcccaggccggagtgcagtggcacaatcccagctctctgtaacctctgcctcccaggttcaagcgattctcctgccttagcctccctagtagctgggattataggtgcctgccaccactcccagctaatttttgtatttttagtagagatggggtttcaccatgttggccaggctggtcatgaactcctgacctcaagtgctcgtccgtcttcggcctcctaaagtgctggcattacaggcgtgagccactgcacccagcctgagttttttttttttttttaagccaaaggaggaggagtagttttgtgcacaaaagccactatttagagttccttaggttttaaacagataattaatttaatgtactaacaaatgcaaaattaaaattttacttatgccttttaattttaagctgaacttgctacattaagagtagggtgatttggctgggcgcagtggctcatgcctataatcccagcactttaggaggctgaggcaggtggatcacttgaagctaagagtttgagaccagcctggccaacatggtggaattctgtctctactaaaaatacaaaaattagccaggcatggtggcacatgtctgtaatcccagctactcaggatgctaaggcacagaatcacttgaacctgggaggcagaggttacagtgagccaaaatcgcgccactgcactccaacctgggcaacacagcaagactctgtctcaaaacacaaaaaaagaataggctgggtacagtggctcacgcctgtaatcccagcactttgggaggccgaggcaggtgaatcacctgaggtcaggagttcgagaccagcttggccaacattgtgaaaccccatctccattaaaaatacaaaaaataagccgggtgtgatggtgcacgcctgtaatcccagatacttgtgaggctgggacagaagaatcgcttgaacccgggaggcgaaggttgcagtgagccgagatcatgccactgcattccagcctgagcgacagagtgagaccttgtctcagaaaaaaaaaaatagggtgatttttatataaaaacactctcatttgttcttgaattaattgccatattgaacagattaaactcctttaaaccattttttctatctacaaacataattagtattcccataagcattttaagctccctttaaaaatttaatatgctcgattttcttttttcttttatttatttatgtagttttcccagacagggtcttactctatcacccagtctggagtacagtgacacaatcctcacttactgtaacctcaagctccttgggatgaagcagtcctcccaccctagcctcttaagtagctgagattccaggcatgagccacctcacccagctgattttctttttaaacacatctaatacctgacaggtcgtaattacgactgtgcttggccatatcatcctaacacctaaagctcacttgtaaactgaaaattaaatttgaagggtgaattaacttctagccaacattccaatatcattctcacatttaatgaaattatcctacaactttgcttaaaagcataaaactagcatgtcagagtctcttaaaaattacaatcactattttaaataacaaacatacaggttaccctgaacttaacacctggttttaacatgatgaagttggtttcttttgtcattcttatactaaattctaaatcttcctggcacttaaggatatttacccaaggaagggggtgagatttaccggctcaggtacaccgaggttactggcttgaaaattcaagaccacagcatggtaaatttttcttcagagattcaaggttcatacataggacttgaagggcacatgctactcaaatgagtatatccaacttgagtgctacatcaacagggaccccatgtccactcttttcagtcgaaattggcttactatctacttcttctgggctattcaggttccgacaattgattgctttcagttaatttctttattgcccagttgaattctgcattcttctagattctttttgttccttcagcctcaatcataataccatttaatgacagtctcatatcctattagactagggtttctcagccttggcactattgacatattgggtcagataattctttgtcctgtgcattgtagaatttagcatcttccttagcttctactcactagaagccagtagcactgtgtgcacatcctccttgccccctgccagctatgacaaccaaaatgtctccagacattaccaaatgtccactgagaggcaaattcactccgagttgacaacccctgtattaaacccaggggccctgcacttcttacatacttttgtctggtcaccagttgaaagtccttcttcttttttttttctctttttgagatggagtctcgctctgtcaccaggctggagtgcagtggcatgatctcggctcactgcagcctccacctcccgggttcaagcaattctcctgcctcagcctcctgagtagctgggattacaggcacgtgccaccacccagctaatttttgtatttttagtagaggtggggtttcatcatggtggccaggatggtctcaatctcttgacctcgtgatccgcccacctcggcctcccaaagtgctgggattacaggtgtgagccaccgtgcatgaccaaaagtccttctaatagcaaagtggaaaggtaggctgtgaacaatcttgaatgccatactaagatttgtacttattctcataggcagtgaagagccatcaatagtttttacagaggctgacctgataactctggcggttcaatgtgcatgctatatactatatgcacaacacattaggaaggaagggaacagcgctcagagaaatcaaatcacttgcccatattacatagctcgtcagtggtggagtcagggtataatcagaaactcatgctccttcctctacctctccccagcacagagttggatcagcactgttcacccagctggtatccccatttcatggtaaagcctggaagcttaggtctgactgatgcttgttgaaatacagactgtgggagcagactgcaggacagcattgtgacagagggtggggccaggagagagatgcggtaggaagactgttaagatgcatctcttattttctaggtggggcagctgcagctctcccacaatctgagtttggtgatcctggtaccccagaacctgaaacatcgtcttgaagacatggaacaggctctcagcccttctgttttcaaggccatcatggagaaactggagatgtccaagttccagcccactctcctaacactaccccgcatcaaagtgacgaccagccaggatatgctctcaatcatggagaaattgggtgagctctggcagcttagggttactcccaggccatcagaggagaaagggggatccctaagatgtagttagcattctctagagtattttttacatccataatctcagtttgtcctgcaaccctgcaagttagaggggtaggtgctattatcccattggatcattgtggaaatggaggctcagaagctttatgtgacttacccagagattccatgatttacccttgagctagtcagaggcaaaccagaacaccgacccaggtctccagctctcctgagttttttctatggttccttgtgacataggcagtggaacagtgggacaggtaaccgaggtgaattatggatgctccttccccagacacatttcaaaacagtcagccaccccgtggaatatgcaagaagctatctggaagtgcagatctggaggcttctgagtttacgagaggcaacagagactccattttcttttttttttttttttttgagacggagtcttgctctgtcacccaggacaggctggagtgcagtggtgcgatctctgctcactgcaagatccgcctcccagattcacgccatgccattctctcgcctcagcctcccgagtagctgggactacaggtgcccgccaccacgcctggctaattttgtttttgtatttttagtagagacggggtttcactgtgttaaccaggatggtcacaatctccggaccttgtgatccacctgcctcggcctcccaaagtgctgggattacaggcatgagtcaccgcgcccagcccagagactccattttctaacctttgtttttttgtttgtttgtttttgagacggagcctcactctgtcacccaggctggagcgcagtggcatgatcttgggtcactgcaacctccgcctcctgggttcaagtgattctcctacctcagcctcccaagtagctgggattacaggcacctaccaccacgcccagctaatttttttgtatttttagtagagatggggtttcaccatgttggtgaagctggtcttgaactcctgggctcaagtgatccacccacctcggcttcccaaagtgctgggattacaggtgtgagccactgtgcccagcctcattttctaacctttgatctcatgtccagccctgtcacttcatttcttgttagagaatttgaccgcctaacacatgattccatttccttgtatatgtcatctgtataggaagaaaacctcttttttattttcattcaacacttctggccaccaaacaggtgtgggagtgttttctaagcaattctccagttatctggggacaccaactgggtgtcctacaattgaatccaattctaacactctacctggaaataacatcagatcccgtgcagtttaagtgctccgccccagcaaatttccccccgtttccaatgtcagttacaagactgggttgtcacctgtgcatcagaccaaccagctataatttggagattcccacaactccctgctagggtttcatcatttgctagaatagctgacaaaactcaggagacacttacatttactggtttattatgtaaaggattaagtaaaggatacagatgaacagccagttgaagagatacatagggcaaaatctggaagggtcctgggcccagcagcatctatcctgtggagttctgtttgctaccttcctgacacatgtatgtgttcaccaaccagaaactctcagaaccctgtactttaggagaagtcatcatgtaggcatgattgattattacccaatctccagctcctctcttctccccagaggatggagagaggggctggaaagttccaagcttctaatcacacttggtctttctggtgaccagccccaatccaggagccagcaggagtagcctcattagcacaaaaggcattcctatgacccaggaaattccaagggatctagtagctctgtgtcaggaactgggatcggagaccaaatattagatggtctaatatttggagctaaagatgctcctatagcatattttcccattatttcacagcatcatggcattgcatataacctcattttttcatatatgacctatctctgatctattacctcacttccaaggtcctgggagataaggaggcaatgacatcatttttcagggttgttttagggatgaggggcaaggcctctcaccttgagagagagtggcagtgttgggcccactaatagaggatcccacgaactgccagagggtacagtatgtaatctggcaaacaagggaagaggaagagagcactgggactcaggatgaacccagagaattcaggacaaaggtctccatcagctgagggtatcatgctggcttctgactctgtttttctctggttttgccctagaattcttcgatttttcttatgaccttaacctgtgtgggctgacagaggacccagatcttcaggtttctgcgatgcagcaccagacagtgctggaactgacagagactggggtggaggcggctgcagcctccgccatctctgtggcccgcaccctgctggtctttgaagtgcagcagcccttcctcttcgtgctctgggaccagcagcacaagttccctgtcttcatggggcgagtatatgaccccagggcctgagacctgcaggatcaggttagggcgagcgctacctctccagcctcagctctcagttgcagccctgctgctgcctgcctggacttgcccctgccacctcctgcctcaggtgtccgctatccaccaaaagggctccctgagggtctgggcaagggacctgcttctattagcccttctccatggccctgccatgctctccaaaccactttttgcagctttctctagttcaagttcaccagactctataaataaaacctgacagaccatgactttctctgctttgcctttgtttttttattttttattttttattttttttaggcagggtctcaatctgtcacccaggctagagtacagtggtgagatcatggttcactgcagccttaacctcctgagctcaaacaatcctcccatctcagcctcctatgtaggtgggaccacatgggcttgccaccatgcccagctaatttttaaattttttgtaaagacagggtcttactatgttgcctaggctggtctccaactcctgggctcaagcaatcatcctaacacagcctcccgaagtgctgggattgtaggcacaccatacctctcctttgcctttgaatatcag

SEQ ID NO: 20 - DNA, 1801 bp, Homo sapiens
  Genbank Accession No. M13690
gggcagaagtttggagtccgctgacgtcgccgcccagatggcctccaggctgaccctgctgaccctcctgctgctgctgctggctggggatagagcctcctcaaatccaaatgctaccagctccagctcccaggatccagagagtttgcaagacagaggcgaagggaaggtcgcaacaacagttatctccaagatgctattcgttgaacccatcctggaggtttccagcttgccgacaaccaactcaacaaccaattcagccaccaaaataacagctaataccactgatgaacccaccacacaacccaccacagagcccaccacccaacccaccatccaacccacccaaccaactacccagctcccaacagattctcctacccagcccactactgggtccttctgcccaggacctgttactctctgctctgacttggagagtcattcaacagaggccgtgttgggggatgctttggtagatttctccctgaagctctaccacgccttctcagcaatgaagaaggtggagaccaacatggccttttccccattcagcatcgccagcctccttacccaggtcctgctcggggctggggagaacaccaaaacaaacctggagagcatcctctcttaccccaaggacttcacctgtgtccaccaggccctgaagggcttcacgaccaaaggtgtcacctcagtctctcagatcttccacagcccagacctggccataagggacacctttgtgaatgcctctcggaccctgtacagcagcagccccagagtcctaagcaacaacagtgacgccaacttggagctcatcaacacctgggtggccaagaacaccaacaacaagatcagccggctgctagacagtctgccctccgatacccgccttgtcctcctcaatgctatctacctgagtgccaagtggaagacaacatttgatcccaggaaaaccagaatggaaccctttcacttcaaaaactcagttataaaagtgcccatgatgaatagcaagaagtaccctgtggcccatttcattgaccaaactttgaaagccaaggtggggcagctgcagctctcccacaatctgagtttggtgatcctggtaccccagaacctgaaacatcgtcttgaagacatggaacaggctctcagcccttctgttttcaaggccatcatggagaaactggagatgtccaagttccagcccactctcctaacactaccccgcatcaaagtgacgaccagccaggatatgctctcaatcatggagaaattggaattcttcgatttttcttatgaccttaacctgtgtgggctgacagaggacccagatcttcaggtttctgcgatgcagcaccagacagtgctggaactgacagagactggggtggaggcggctgcagcctccgccatctctgtggcccgcaccctgctggtctttgaagtgcagcagcccttcctcttcgtgctctgggaccagcagcacaagttccctgtcttcatggggcgagtatatgaccccagggcctgagacctcgaggatcaggttagggcgagcgcacctctccagcctcagctctcagttcgagccctgctgctgcctgcctggacttgcccctgccacctcctgcctcagtgtccgctatccaccaaaagggctcctgagggtctgggcaagggacctgcttctattagcccttctccatgccctgccatgctctccaaaccactttttgcagctttctctagttcaagttcaccagactctataaataaaacctgacagaccatg

SEQ ID NO: 21 - DNA, 982 bp, Homo sapiens
  Genbank Accession No. X66924
agacaattttcagcaggaagaagtagaaaggataaaatggatcctgcaccacgggaacctcacagcacctcacttcttttggttttctttctctttggggcacctctggactcactccccagcatgaaggcgctgagcccggtgcgcggctgctacgaggcggtgtgctgcctgtcggaacgcagtctggccatcgcccggggccgagggaagggcccggcagctgaggagccgctgagcttgctggacgacatgaaccactgctactcccgcctgcgggaactggtacccggagtcccgagaggcactcagcttagccaggtggaaatcctacagcgcgtcatcgactacattctcgacctgcaggtagtcctggccgagccagcccctggaccccctgatggcccccaccttcccatccagacagccgagctcgctccggaacttgtcatctccaacgacaaaaggagcttttgccactgactcggccgtgtcctgacacctccagaacgcaggtgctggcgcccgttctgcctgggaccccgggaacctctcctgccggaagccggacggcagggatgggccccaacttcgccctgcccacttgacttcaccaaatcccttcctggagactgaacctggtgctcaggagcgaaggactgtgaacttgtggcctgaagagccagagctagctctggccaccagctgggcgacgtcaccctgctcccaccccaccccaagttctaaggtcttttcagagcgtggaggtgtggaaggagtggctgctctccaaactatgccaaggcggcggcagagctggtcttctggtctccttggagaaaggttctgttgccctgatttatgaactctataatagagtatataggttttgtaccttttttacaggaaggtgactttctgtaacaatgcgatgtatattaaactttttataaaagttaacattttgcataataaacgattt

SEQ ID NO: 22 - DNA, 1203 bp, Homo sapiens
  Genbank Accession No. X69111
gatctggggtgctgccaggaaaaagcaaattctggaagttaatggttttgagtgatttttaaatccttgctggcggagaggcccgcctctccccggtatcagcgcttcctcattctttgaatccgcggctccgcggtcttcggcgtcagaccagccggaggaagcctgtttgcaatttaagcgggctgtgaacgcccagggccggcgggggcggggccgaggcgggccattttgaataaagaggcgtgccttccaggcaggctctataagtgaccgccgcggcgagcgtgcgcgcgttgcaggtcactgtagcggacttcttttggttttctttctctttggggcacctctggactcactccccagcatgaaggcgctgagcccggtgcgcggctgctacgaggcggtgtgctgcctgtcggaacgcagtctggccatcgcccggggccgagggaagggcccggcagctgaggagccgctgagcttgctggacgacatgaaccactgctactcccgcctgcgggaactggtacccggagtcccgagaggcactcagcttagccaggtggaaatcctacagcgcgtcatcgactacattctcgacctgcaggtagtcctggccgagccagcccctggaccccctgatggcccccaccttcccatccagacagccgagctcgctccggaacttgtcatctccaacgacaaaaggagcttttgccactgactcggccgtgtcctgacacctccagaacgcaggtgctggcgcccgttctgcctgggaccccgggaacctctcctgccggaagccggacggcagggatgggccccaacttcgccctgcccacttgacttcaccaaatcccttcctggagactaaacctggtgctcaggagcgaaggactgtgaacttgtagcctgaagagccagagctagctctggccaccagctgggcgacgtcaccctgctcccaccccacccccaagttctaaggtcttttcagagcgtggaggtgtggaaggagtggctgctctccaaactatgccaaggcggcggcagagctggtcttctggtctccttggagaaaggttctgttgccctgatttatgaactctataatagagtatataggttttgtaccttttttacaggaaggtgactttctgtaacaatgcgatgtatattaaactttttataaaagtt

SEQ ID NO: 23 - DNA, 2481 bp, Homo sapiens
  Genbank Accession No. X73428
agctttcttcttttccctgttgctcaaataaatagtgttctttgctcaaaccccctttccctcctccttctgcaatctcagcgcctagcgaaatctgttttcttcattgtaacctcagcttcaccgcaattaattttttttccctctggtcacaagataattcctgacgccagtgagtctggaggtcagacgaacagcaaattggggaacaaggcggcactaattccttacaagttccttgaaaaatctttcgcttaaaaaaaacggggggtggggggagcttctttgctgttcagggatttatgcctcgcggagctgtggctcgaaccagtgttggctaaggcggactggcaggggcagggaagctcaaagatctggggtgctgccaggaaaaagcaaattctggaagttaatggttttgagtgatttttaaatccttgctggcggagaggcccgcctctccccggtatcagcgcttcctcattctttgaatccgcggctccgcggtcttcggcgtcagaccagccggaggaagcctgtttgcaatttaagcgggctgtgaacgcccagggccggcgggggcagggccgaggcgggccattttgaataaagaggcgtgccttccaggcaggctctataagtgaccgccgcggcgagcgtgcgcgcgttgcaggtcactgtagcggacttcttttggttttctttctctttggggcacctctggactcactccccagcatgaaggcgctgagcccggtgcgcggctgctacgaggcggtgtgctgcctgtcggaacgcagtctggccatcgcccggggccgagggaagggcccggcagctgaggagccgctgagcttgctggacgacatgaaccactgctactcccgcctgcgggaactggtacccggagtcccgagaggcactcagcttagccaggtggaaatcctacagcgcgtcatcgactacattctcgacctgcaggtagtcctggccgagccagcccctggaccccctgatggcccccaccttcccatccaggtaagcctcgaagtcgggacagggctgaacacccaggcaaggatgctgcgggaccctcggagctcccgattgcctcgcgtaactcttccctcttttcctctaatcagacagccgagctcgctccggaacttgtcatctccaacgacaaaaggagcttttgccactgactcggccgtgtcctgacacctccaggtgagtatctcctctcttggagagggaggtttaaacggcaagtcctggagttggcagacgttttgaaaaattgccactcactcggtttagggaaactgaggccagagagggacaagtgacttgcccatggttgcatcaaatgaatggcagagtcagtttccatgtgatgtgcatttaagccttaatgcgcctggccctgcctccgcagtggccgaggtctggcaagtagacatggtccgactaaatacaagtctttctgttccatgttgtataggagctgtcttcggcagccccctcccagctagtgtcaattccaagtaggaggggtagcgcaacgtccgcctgtggtctttggcgccaactgggtgggggcagcgtggggggcggagttatcaggctggaggtacagaccaagtttcctccctggcgccggccagtctgcggacggcccccgcctcggcacgctcggcggaaactgactgctccttggtcttctttcctcccccgcccagaacgcaggtgctggcgcccgttctgcctgggaccccgggaacctctcctgccggaagccggacggcagggatgggccccaacttcgccctgcccacttgacttcaccaaatcccttcctggagactaaacctggtgctcaggagcgaaggactgtgaacttgtggcctgaagagccagagctagctctggccaccagctgggcgacgtcaccctgctcccaccccacccccaagttctaaggtcttttcagagcgtggaggtgtggaaggagtggctgctctccaaactatgccaaggcggcggcagagctggtcttctggtctccttggagaaaggttctgttgccctgatttatgaactctataatagagtatataggttttgtaccttttttacaggaaggtgactttctgtaacaatgcgatgtatattaaactttttataaaagttaacattttgcataataaacgatttttaaacacttgtgtatatgatgacacccgtctccattaagtactaatgatgctttctcgcacatggccgaattttgggagctttgggaaagtgaacttgcttattctacgagagggaaatgaaaaactgcctggttgagaggggatggggtggagagagaagggttcatgatgggagtctcatgtccattgagggatgggtgcagagaaaagttctggctctgcctcattatttcagagatgaaaccagagactggtgcaagct

SEQ ID NO: 24 - DNA, 129722 bp, Homo sapiens
  Genbank Accession No. AL021154
gatcctgcaaaaataattatgagtagggacaaatatttaaatccaaggatgcttctccaatgacaggaacagattaaatacataatggcttatgcaggttttggcacacccgtttgattgatgtggaagaatatgtaatggtgtacaaagatggccacaatgtattttttgaatgaaaaaagcagattacaaaacagtatgttgttatgatctcatttttataaaaacatttcttcatacatagaaaaataaatgttaaaatgttaatattttaggcttgaaaattaagaatttttctcctatttttgggtagtttctccccatccaaccttttttttttaatgatgaaaactgcaatgttacccagaccttgtaaaaaaaaaaattcaaacaacagagagtattatccgcctgccataaccctaagcctctgctaaggatgattaattttttttcttcttttacttctccatattttcaaaattattcataataagcataaattgctttggcaaaatgcaagagaaaacaaaattttacaaaaaagcacaaacaatgctctacagtatgggcctggctgggcagagggcaaaggctgggatctggacagactcctcataagacagagcccaaggagtctctgcccaggaggaattggccactggttgactgaggctccttctttccccatgatgtcccagtagctggtgagagatctggagtatcgtgtggtgtgcacaggacacagaaagccatttccttctctagatataccaactgacactgaggaacgaggagcaaggggcataaaccccagttctgcctctgccaagctgtggggccttgggcaagtgacttaacctctctgagtcctcctgtggtaattgtgatactaatacctctctcacacatgacagggtgactgtgaagattaaatggccagcacgcggaggtgtttggtcagtgctagctccttcccatccctgcccatgtctggcaccactgagcagatgggactctgagagcagcatcctgaggtcccttcacaatagctcctttggtggtctcgtggcccagtccccagaatccagtcaggtctgggtataaacaatctgctgtaaatgcctctacagagccagatgtcacccaattctggatgacatgtctcggcagcatttaggttcttccctatccagcctaagtgctactctcccagacaaacgaccctggctgtggccacttacattttggcttcatagtccttccatgccttctccagctgttttttggaatcctgtgggttaaaaaaggacaatttgcccagagggaagctggagcactggaataaacagtatgctctgctgcctgtaggaggacctgctagtgtgctcccctgagctgctcagagcccttctctaaccagcccctgcccccacagtcctgctgcaaacctgcccccaccaaacaggctcagctgaccccatttctcagagctaaggccctcctcccagcagaccttctcctccccagagatgccaagaatcagtcaggtttggtgggccatggcttggggtgtgaagagatctttgggctctaccctgagtcctcttgctcagaagagagatcagtcatgaccatgaggatgggaggatgaaggccaaattccccctgcctaactttagcccagcattttctcctgcctggtgctagatcatcctcttagagcaagggtacaggtcaaggaacatgcacagagaggttgagaagtctaccccaggccatacagcaaaccagggagacctgactaccccctgcctagcttgcctaagcctcatccagccaggctgctcacacccttctgaacaaccccgagactcccaaggtgaaaaagctgcctgtctggtttgtgtggttagcaggctggtgccacgctggcagcctagggcagggagggaaccctcttgggggagcacggctcctcccctgggccgtctggggcagattgcccagagagattattctgtcaccttctttgagctccactctgcatccagccaagggctgccaggcacagagaaagcagctcgagtatgggattcaggatccctggattcccacatgggctctctacttcctagttatgtaaaccatcagcaggttacctaactcccttggcctcgaatttcaactgcaaaatggggatgagtgtacccacaaagcctacctcataggatggttgtaagatttacatgacatgtttcacacaaggggcctggcagacagcaggtcagccatcctaggctgacccgagccaggtcctccagacctccccaggctcatcactcccgctaagacagccccttcacctggcctccaccctcagtccagccctgccccccaacagtctcctgcccacccctcttttactctgtcccaccaccactcccagcatggagactcacctgtcgaccgtccctcagctgccccttcatcagactgtccagggggaaagagacaatgttgttcaagttctgaatctggaaaaaacagagacgctcattcccgcctcaggtgaccggcatccagcccctagggattcggtgtacagtgaagcatcacttggcaaagagagcagcggggaagggaagtaggggagaggaaaagatgttatcaaagagatgacagccaagtaagggggaccgtcatggcaggagtgctgagcctgcggggggggactagaggatccagctctggggtctgcttaggatggctgacctgctgcccgccaggcttcctgtgtgaaagggggcaggaggggaggccgaggtgtgtcagagtgagccccttccctgatggctccagcctcatcgctgcactgctccagcagcatcccacagtcaatctctcccctgttcctcgccaggagcagcctcccttctcctctctgactctctcaagttgacctgtagtgcacgtctgttgttctgggctggctaacgcttcagagcctcccctattaatggtcatagaaccccctttcctgtggggaactcctcctctgtggtcagatggggtaaacgcagaagtcagatctgagcagggcaccccagccccaggatagagggactggatagggaacaggcacgcacccaagccagccaatcacaatcctcgctgggatttttctgcctaagttgtgggagaaagaccatctttattttggtaagatgggcatctgggcctgctgggctatcctgtccactgagcagagacagagaaactaccttaagaggaaaggatagagcctaagccagctgcgcccctggacttctcattacaggggctaatgaattcccttttaaaaatttaacctagtttgagttgggtttctgtgatttcgcaacctaaagaggcctaatatttcaaccagcttccaaggtacagcttgggtctctcctcctccaggaagtctctcctggctactcctcccgcctggtctatgctgatctccccttttctgaaccatggcagcactaggcctctgacaccagctgctgggtccttgagtttgtgccatgctgctggtatttcttgacactagtccacaccctagtttttctctcccccactagactgtggctctctgaggcagtctgacactttcctgtgtcaccaacccctggtacaatgtccactagacagcagacccccaggaaacactagtttgactgaaacagggagagaagaggtgaagacaaagaaggacactaattcaattgaactcaaacactatttttttttttgagacagggtcttgctttgtcacccaggctggagcacagtggtgtgatcacactcactacagcctcaacttcccccaggctaaactgatcttcctacttcagcatcccgagtagctgggaccacaggcatacgcccccacacctggcatttttttttttttttttttgagatggaatctcgctctgtcacccaggctggagtgcagtggcatgatctcagctcactgccacctccgcctcccgggttcaagtgattctcctgcctcagcctcctgagtagctgggattacaggcacctgataccacacccaactaatttttgtattttttcgcaaagacagtttcaccatgttggccaggctggtctcgaatctctgacctcaagtgatccgcccaccttggcctcccaaagtgctgggattacaggcgtgagccaccgcacccggcaattttcatacttttgtagagtcagggtctcactacattgcccaggctggtctagagcttctgggctcaagcgatccacacacctcaggctcctaaaccactgggattaaggtttgaaatgttgcacccagcctcaaacactgttaaaggctttttacatgcaggacagtgtacgaggcacagctatgccaagagctataacaatgatagattttattaggttggtgcaaaagtaattgctgttttgccattaatataatattagccaacatttactgagcgcttaccataaagtaggcactaacttgcttaatcctcattaccgctctgtgaggtaggcagcattattatcccagtttcacagatgagagacctggggcttgggcagactgagtgacttgacctagtaagcagcagagtgaagattccaagctggagtctaggtccaaggttgggtgcttaaccactgagcacactgcctctcaaggatgatgtggcccctgccaaccagggaggatgctgggtaggactggagccacaagagctggtccagtgccatggagcctggagggagatgagaggctttcctgggaggcagtgtagccaggcttatgcttggactctggagccagacaacctgggttcaaaccgaaccgtgtgacctcgggcaagctgcttaaccttgaggtcctagtttcctagcctgtaaggtggagacaacagtcacaccagccccacagagctgtgcatccggatcgaatgagtgaacacatgaactagtgagaactgtgcctgcacatgggaagagctgctgtcacagggtggccttgaggaaaggacttgaaggaccagagaggaggcagtcaccaaggaggccatcgggaagcaacccgaggccactgggccatgtacaggggctgagacgcttgtggaggcagggacaggtcctgggatttaagtacgaagcagatgtggattgggaaagcagaggacaaagagggagtgaggagaggaggaggcggtggcagcggtggtggtggcagtggcagcagtagtggtataaaggtaggaacccccgagcctgtctctcctttatcccaaagctcctccagggaaccctcccttgcacggggctcttccctgctgtgagaccccctctgctcctgggtgaagagaaggaggagaacagagagaagagttagttgggtaagaagccagagagaaaggaggattatccaaaagaagggtcagggctggaaagggacctcaggtctgaactcaggtcagagatcaagggcaaattgggagaaggaaggaaacggaccctttcccagtcaggttcttaagaccactagatttaccctgagtctgggcaaggaagagacaggggcctcaccaggttcttgaagagcgcagcaacctcgcgggtgaacacggccaagtttaggaagcctgtggacagctcatggctgttctgggacaggtggctgttgcctaaggattccacggcctctcggtactgctcttcattctccacatggcctgtggaggtacagacgggagcttggagttagctccaggctggggctgggagaggggcttcctgaccaggcggggcacccaggaggctcacttaccaaggccggagctatggattgcccgcacagccttctttattctctgcaggatggcttggtctccttccaagatctggaagcaaatgtggacagaggttcagggatgccaagctggaatagggtgcttccttcaggaacgctgtatctatgatttccaccccccaaccgccctccaaacaaatacattgagttttgctgtcctctggaacttatccctagggtcttcctgtttaccccaccaaacaaaaaaccacacagaaaccacagaccagtcacaccactccaagaagaccacagacttttctccctgaatccaatgcagcgtaaatgtagtgagtcaaaggtacgtggcatgacagggtgtgccaggcctgggtttgaatcttgcctctggcagtagctggtgtgtccgttagacaaatctgttaacttctctgagccttgagtgccttgtctacaaaatggggatgatactaggggacttgtggagttgctgagaagatgaatgatttgtaaatatgtacaaaatgctgagcaaaaggccagaggggagaacacacacatctctatcttcccttaagatacaaagcagggtacacttgttcaccaaaccccaggctcaataaacagttatgtcaggacaaggaggaagaggccaggatgctatgggtgagcagagaggggttggaggcattcagttacctgagtctggggagatggcagagggtggcgggagcacactccatcaccactggggagaactggagagacaacaccagataaccccaaagcccagaggctgcagaacaaacatcagaatgtgggaaaggccagagatgtgatggcaagaagcaagtctcacatgccccaagcaggctcagcctagatgggaaacactccccctttcagtggggcatggaagttgacaacctcatgaaatccttgcgaaatgcacagttaacttggaaaacacagaatgtcgagctggaaggggcccacagatgagaaaactgaagccaagagatgggaggcccttaccgagagacacatggtggggaagccacagagctggacttcccgggtgcaacagaacagtgttccatccatgtaccacagccccaccctgaccccagcccagctgttcttcccagtgacaaaaataaaatgggatcagagtctgatttccagagttacatgacaagagttagtaaacacattggaaatggtactgccaaagattcaaaatgatacccacaggagaacatgcatagggcagaactcagaggcaatgtggagtgttctcagaggccggtggcatgtgggaagcctctggaggaaggggggtctagttacgaagctcagctccactactcgggggctatgtgaccttgaacaagttgcctattttttttgagaccaagttttgctcttgttgctcaggctggagtgcagttgcacaatcttggctcactgcaacctctgcctgccaggttcaagcaattctcctgcctcagccttctgactagctgggattacaggtgcccaccacctggctaattttttgtatttttagtagagacggggtttcattgtgttggccaggttggtctcaaactcctgacctcaagtgatccacccgcttcggcctcccaaggtgctgcgattacaggcatgagccaccgtgcccgggcacaagttgcctattctttctgagcttcctgattagccatgtgtaaaatggggaaatcgatgcctacctctcagggttggtatgagggctatatgtatgagaggatgcaaatacaggatttagcttggtgctaggcatggagtatgttcaaaatgaacagcacctgtgatcgttatcatcagctgctgctgatgctaggaaggtctgccaagttccaggtgcttttcctacaggggctagaaatctaacattctcctcctcgggtgtgaacttgagacactttcatatttgagatccgtggaggcccatcccagggctgaagaaagaaaacaaaagaatcaggaagattaaggagacggcatcatatttgagttggttaaaacatgaggctgggcatggtggctcatgcctataatcccagcactttgggaggcagaaacaggaggatcacttgaggccaggagttcaagaccagcctaggcaatatagtgagaccttgtctctaccgaaaagaaaaaataaataaattagctgggtgtggtggggtgcacctgtaattccagcacttggggaggccaaagcaggaggatcacttgagccaaggagttcaagaccagcctggacagcttggcgaaaccccatctccatgtggtggcatgcacctatagtcccagctacttgggaggctgaggtgggaggatcacctgagcctggggaggtcaaaactgcagtgagccctgattgcgccactgcactccagcatgggtgacagagagagccctgtctcaaaaagcaaagcaaacaaacaaaaaacaaccaaaatgtttcttactaaagagacaaagaggtggaggggagaacgtttctttctaaactggccaacagaaaaagaaaaaaaaaaagaggcaagaacatggccacttctatggttccccaaaatccagatggggaaacagaagcatgtgtttaccaaatcccttgatccccatcttgaaacctggaaagctaaaaggtgagtaatttaaggagctatgatttcgctctaaaagacaattcaggttaaagatatgaacaactgggccagcacagtggctcacgcctgtaatcctagcactctgggaggccaaggcagtggatcacctgaggtcaggagttcaagaccagcctgaccaacatggcgaaacactgtctctactaaaaatacaaaaattagctgggcgtggtggtgcacacctgtaatcccagctactcaggaggctgaggaaggagaatctcttgaacccgagaggtggaggttgcagtgagctgagatggtaccactgcactccagcctgcacaatgggagcgagactccatctcaaaaaaaaaaaaaaaaaaaaaagatatgaacaatttccaaaaaaatttccaaaatccctagagggcagatccatgtacctagcacacagaaggtgcccaataaatgtttacctaaatgaatgatggtttgcaaagtcctgggacatggacctgagaggagtatgttcatgctctagatacattctgaggagtcttcccatcccatgacacccattttctgaaaactgccctcccttcctctggaggtgggcccctgcagccttgtttgttctagccagagtcgacagacacctggttcaagctaaaccaatcagattctctctcccacctgacccaagctggaccaatcagattctctctccaaggactttggaattgggctctggaaagctagttgactgactgaaatgctaaagctgggatgtccttcctgccacatgcagagagaaaagaacagagcagatgtgtagaaagacatgaacaagccccacaccgccacagcaaggcagaagaggaagagtggtgctggtttctggcaactttccagatgctacctcttcagaggcaacctccacacattatgtctttggtgaaattccatgaaatacccctgaatccacccaacgaagttcctttaagcaagtttgagaagatttcccttccctgcagtgtggcagagatcactgggtggctcccagtgtccattctctcttcttccttcacaagaaacctgacttttcagatggccacttggcgacctagaataaagactacatttcctaccttgcagctaactgtggtcatgggactaagtcctggccatggaatataatattttaattgttaacttccaaaaagtatcttacaaagaagggagataacccccaaactcatcaagttgtatacactgactatgtatagctttttacatgtcaatcctacctcaataaagtggctttaaaaaattgaaaaataaaaaggaagggagggactacacacctgttagaatggccaaaatccaaaacactgacaacaccaaatactggcaaagggaggccgggcacggtggttcacgcctataatcccagcactttgggaggctgaggctggtggatcacttgaggccaggagttcaagaccagcctggcaaacatggtgaaaccctgtctctactaaaaatacaaaaattagccaggcgtggtggcacaccgctgtagtcccagctactcgggaggctaaggcaggagaatcatttgaacctaggaggcggaggttgcagtgagctgagacagtgccactgcactccagcccaggtgacagagtgagactccatctcaaaaaaaaaaaaaaaaaaaaccaaacaaaaacacacacacacacaaataaataaataaataaccccaaaacacaaatactgacaaagatgtggagcaacagaaactcccattgttggtgggaatgcaaaatggtacagccacttcggaagacagtttgacagtttcttaactaaacgtactcttgccaaatgagtcagcaatcatactccttcatattttctcaatgagttgaaaacgtatacatacctgcacacggatgtttacatcagctttattcataattaccaaaatttggaaacaaccaagatgtccttcagtaggtgaatggataaagaaattgtcatgcatccagagagtgaaatattattcatcactgaaaagaaatgagctatcaaaccatgaaaagatgcagaggaaagttacatgcacatcactaagtgaaagaagccaatttgaaaaggctactacatgatttcaactatacgatattctggaaaaggcaaaactatggagacagtaaaaagatcagtggtggccagggatgggggtagtgaggaggaacaggtgaagcacagagggtttttagggcagggaaacatttctgtatgatgctataatggtggatacatggaattatacacttgtccaatcccacagaatgtacaacactaagagtgaaccctaatgtaaactatggacttttggtgatgatgtgtcaatgtatggtcattgaaacaaatgtaccactctggtaagagctgttgacagagggggaggctgtgtgtatatggtaactctatgtacttcctgcccaattttgctgtgaacctaaaactgctctaaaaaataaagtcgattttttttaatttagaaaaaaagggcctggggtggggtggctcacggctgtaatctcacactttgggaagctggggcgggaggattgcttgagcctagttcgaggccagcctgggcaacatagtgagagtctgtctctacaaaaaattaaaaaccaggcatggggcatgggcctataattccagctactcaggaggctgaggtgggaggactgtttgaccccagggagttgaggctatagtgagctgtgatcgtgccactgcactccagcctgggcaacagagcaagaccctgtctcaaacgcacccccccacaaaaaaaaaaaacaaaagaaaaaaggggaatgcaagggtaccctctgtcacccctttcttctggctacaatgtgctggcgatgtctagagctcaggcagcaatcctggaccatgaagtagaagccatttgttatggatggcggagcaacaagatatcagccttgtccctagtgattaggaaactaccctagcagccccagtctacttatctgtggaattctttaatatgaaagagaaatctcttatttgagccactgttatactgggtattctgccacttgtggctgaaactagctctaactggtaaagggagacaagtcacccgaatcactcacagactgtttttcttttctttttttttttttgagatggagtctcgctttgtagcccaggctggagtgcagtggcacaatctcggctcactgcaagctctgcctcccgggttcacgccattctcctgactcagcctcccgagtagctgggactataggcgcccgccaccacgcccggctaattttttgtattttttagtagagacggggtttcaccgtgttagccaggatggtctcgatctcctgacctcatgatccgcctgcctcggcctcccaaagtgctgggattacaggcgtgagccaccgcgcccggccacaaactgtttttcgatgcccttgtcagacatctatcaggaaacagcttcccagccagataccattcccgtccctactgctcttggcagccaagttcacatggctgtttattcattcaattagttattgagtgcccactacaccctgtgtaaaaaagacacaatctcagccgggcacagtggctcacacctgtaatcccagcactttgggaggctgaggctggcagatcacgaagtcaagatcgagaccatcctggctaacacgtctctactaaaaatacaaaaaattagccgggcatggtggcatgtgcctgtagtcccagctactagggaggcggaggcaggagaatcgcttgaacctgggaggcggaggctgcagtgagctgagatcacgccattgcaccccagccaggagggcagtgtgagactccgtctcaaaaaacaaacaaaaaagacacaatctcagctctcaaggacatcatcattgaagggaagaaaaagccattataagcagacacttatcatgcaatgtgatgagggctatgatggaaggttcctgggagtccagggaaaacagagccatgtctgctttgaaggaatggggaaggcgtcccttaagctgtgttgcttaactctggcccctggacaggcagaaaagagactaaagagactacactatgaggtagaggggagggaatgcttggtaaaaaatggtaggactgccaggaagggaggcgtgctctgggaagaatggacaaggacaggaacatagttcctccattcattcattcatttcaacaagcatttcttggtgactgtttcagccaggcatggtgccagatggtggggacacataagacatggccccttccttcaagagaaccacagacttaagaacatgcaagtgcccatagggagcatgaaaagggaaaagttctaattactcctttctcaagaaaatatctgaaaatcatttacactggttgataacacctatcctgtggtataatagggctcaaagatttaagctaaagaaatgcaggtttttttttttaatccactcatccacacactcataaaaaaatttagttttaaggagacgattctgatagtagcctggggaaaggaaggtattttgaggaaaggcagaggtttccagagtgctatgatgagtcagtaactaagattctagccccagcatctccaaaattatctccttgggtgatactagcccagctagttttctaaacttcctctcctttaaaatagatttttatttttttatttttttatttttgagatggaatctcgccctgttgcccagcctggagtgcaatggcacaatctcggctcactgcaacctccgtctcccaggttcaaatgattctcctgcctcagcctcccgagtagctaggattacaggtgcccgccaccatgcctggctaatttttatctttagtagagacggggtttcaccatgttggccaggctggtctcaaactcctgacctcgtgatccgcctgcctcggcctcccaaagtgctgggattacaggcagaaaaatccattctctgcttaactcacagaattactgtgaggcttaatgagatcacaaacatggcaaggcttgaggcatttggaaaacatgagtatggttcttactgtggtttgttttctgcctctgtgtgagatcagccctcgtttcccatgaaactggatagatgaaggaaaagccaggtgtggcggctccctcctatcatcccagcactttgggaggccaaggtgagaggatcgcttgagcccaggagttcaagaccagcctcggcaacaaagtgagacccccaccccgatctataccaaaaaaaaaaaaaatttttttttttgagacacagtctctctctgttgcccaggttggagtgcagtggtgtgatctcggctcactgcaacctccacttcccaggttcaatcgattctcctgcctcaggctcctaagtagttgggactacaggtgcccgccaccatgcccggctaatttttgtatttttagtagagatggggtttcgccatgttggccaagctggtttcaaactcctgacctcaactgatcctcctgtcttggcctcccaaagtgctgggattacaggcatgaggcactgcacccgaccattacaaaaaattttttaaaaaagttagccaagtgctgtgacacacacctgtagtcccagctatttgggaggctgggatgagaggagcccttgagcccaggagttcgaggttgcagtaagctataatcatgccactgcactccagcctgagtgacagaatgagacactgtcttaaaaaaaaaaaaaaaaaaaaaaaaaaaaaaaaaaatcagcttctgggttcaggtgggcccatttaatccctgatagtcagagattctcaaggtgggggccctcaaccagcagcaggcatcatccaggaacttgttagaaaagcaaattctccagctgaatcagaaaatctgggggtgaggtccagcaatctgtggtttaacaagccctccaggtgattctaatgcatgctaaagtttgggaattactgttctaattctcttcagagatgcagtacatcatcattgctaaaagtatggggctgtccccaaactacctggatttgaattccagctccaccaggtacctgatgtgatctctcagtccctcaatttccccattcataaaatgaagatgataatattgcgtaccacataaggttactggggagattaagtaaattctataggtaaagtgcttagaatactgtccactatttgataactaaaaatgttatctacttcaaaattaaattgaatttggtttaggaatttctcaactttcattgaattaattaaacatatctccccacacccccaactccatgttgatcctcgtcagcaagctgtggggaagcacaggtggagagggaccacagcagacctctgccgccgggcagggagagtgcaagcagcatgtcccaagtgcctgctctgtgcagcctcattacttgtcactatcctggccactctttgaggaaggcattgccattcccattttaaagatgaagctgtcaggaggaggaacatgtccaagtcacacagtgatgaacagtggcagagctgtaactttttttcttttttttctttctttttttttgggggggggatagactctcactctcgcccaggctagagtgcagacacacaatctcagctcactgccacctctgcctcctgggttcaagcgatcctcctgcctcagcctcctgagtagctgggtttacaggcgtgtgccaccatgcccagctaatttttgtatttttagtagagacagggtttcgccatcttgaccaggctggtctcgaactcccgacctcagatgatctgcccacctcggcctcccaaagtgctgggattacagacatgagccactgcacctggcccagagttacaatttaaatccaggactagccaaatccagggccaatgttctttccccatctctaagctgccccacaaagttagggggcacagcttatttgatcttgggactggatctgcctccaaacctaaatcccaattctaccacctctaccatattccctcaccatcccctcaggcttaggaaagggagaaggcagggcacagagggagatctgtccaaggaaaacaaggttgacagcaatggtgaggccccgaatacaaacactgtaaaggatgtcctactgaaaagaaaacggatttgttcaggctggcctcagagaggattcccaggactgagaggtggaagttagggaggcagaaacagacttcagctcaaacaggggacatttctaaggaagaacaggccacccctgaaggcagtgagctccctgtcacttgaagtattcaaatactttaggtgctagagagtgattcagacactggattttggattagaatggacagctatttagatttcattcaaagctaagagtcaatggatccatgcaagagcctggcaggcactgggcaaaggtggctgaaacacatcttagtgtaagagacacgtctgagcttggaaagcccactggagtcctttgggcagcctaccctggctggccctaaacaaggcctaaattccagctgctggcactgccctttgtgtcccctaccctgatcccaacatacacacacaccatgctctggctctctggtttgtgttctctgcaggcaaaagaccacagatggcagcactaggccatgcccagctgccctgcctagaagggccttctgcatgcccccttctgggtcaggattcatcaataggacccattcttcattcccatggtttctcagagccagctgtggttaccaaggcaactcaagccaagggggcagagctgctagagctaaggccttgggagatacagattacatttcaccattagacattcattcctttggaccattataatatagtacatagttatcacttctgtgtcatcccatgaccattacagccattattattattattattattttgagatgaaatctcgctctgtagcccaggctggagtgcagtggtgtgatctcagttcaccgcaacctccgcctcccaggttcaagcaattatcctgcctcagcctccagagtagctgggattacaggcatgcgccactgcacctggctaattttctgtagtagagacaggggtttcaccatgttggccaggctggtcttgaactcctgacctcaggtaatccgcccgcctcagcctcccaaagtgctaggactacaggcgtgagccacctcacccggcccattacagccattattattattattattattattattattactatttttgaaatggagtcttgctctgttgcctaggctgaagtgctgaagtgcagtggcgtgatctcggctcactgcaagctccacctcctgggttcatgccattctcctgcctcagcctcccaagtagctgggactacaggcgtgagccaccacgcctggcccattatagccattattaatcgatcacagtgttttccccactgactgtggatttggttcatcattctgttaagatatgatggtagcctctaccaattaaactagagttggcagaggagatgaaaaacattttctatctttgctttggactatggtgttgttccttaagagacgaagtcacagaatattagagattatctaacattacctcctcattttacagactgcaaaataaaggctcaggtgagtttcttgccccaggtttcactggaaatgcaaacaaactaagaaacaaatacaaactaggtcggcgtggtggctcacgcctgtaatcccagcactttgggaggcagagggaggtggatcacgaggtcaggagttcaagaccaccctggtcaagagggtgaaactccgtctctactaaaaatacaaaaaaaattagctgggtgtggtggcaggtgcctgtagtcccggctactcaggaggctgaggcagagaactgcttgaacccgggaggcagaggttgcagtgagccgagatcacgccactgcactctagcctgggtgacagagtgagactccgtctcaaaaaaaaaaaaaaaaagaaaaagaaaaaaaaaatacaacctaaaacttgtatagagctttacagtttgtaagggagtttgacacccaccatttcagacacacagcatcttaatggggcagtcatcatttttgttcccatctggctgatgagtcagcgaggcacagaacagtgaagatcattgcctgagctcacacagccaaaatgtggacctgggaactaaaccgttaagactctaactcccttgttcatttccaggcaatggacccagaccctgaaggtccatggtgttactagcaggacactgtgaagccacactcatcatgagcactactgacgagtataaaaatgtttcacaaattagtctgaccacattccaaatatgtgcaactctatgatcaataagacacagaaccctttaaaagcattcttgaattcatttgttctttcccatatttttcaatcaatcaatactaacagtatacgtgatgtgggaagatcaatgaaactccaacgctaaaaaggagttttcctgtgggatggctgaatcctggctctttggtctctgacgccagtgtccacaaagatgattaaattatatgtactacatattaaacatgatgctaaaaatacaacgtttggcagggtgcggtggctcacgcctgtaatcccagcactttgggaggctgaggtgggaggatcacgaggtcaggagtttgagaccatcctttagttgagatagggtgaaaccctatctctactaaaaatacaaaaattagccgggtgtggtggctaatttttgtagtcccagctacttgggaggctgaggcgaatcacttgaatccaggaggtgggggttgtagtgagccgagatcacaccactgcactccagcctgggtgacagagtgagactccatctcaaaaaaaaaaaaaaaaaaaaagtacaatacctgaatgagcaaaccaagttacacttaaaatatttaacaaaatgataaagtacaaaaaaaaaaacaaaaaaaacccagggcttctcacttctagatccaattaccaatttacagaaaatgcaggtcaggtgttgtggctcctgcctgtaatcccagcactttgggaggcccaagtgggtggattgcttgagcccagaagtttgagaccagcctgggcaacatggcgaaaccctgtctctacaaaaaatacaaaacaattttccaggcatggtggcacacacctgtagtcccagccacttgggaagctaaggtagggtatcacttgagcccaggagtccaaggctgcagtgagctctgattgcaccactgcactccagcctgagcaacagagcgagaccctatctcaaaaataataataacaataataataaataaaataaactcaaacccaggcagttgggctccagagtccatgcttttaaccaaacctctaggttttattctataagtgatggggtgctcctgaagggttctgaacagggcagttacttggtaattctcaacatagaaagtttaactccagggctgggctgcagatccatgttcaagcgggacaaagagggttcagccttgtcccccaggcatgacagggtgataggaacacagccaggccctggcccggagcagatcacccaacaggaaggactcccattccaagctcccagcttgagtctattattagcatgaattcaactacctatcgccccactaactgactgctcactttggggcaggcattttatgtttgttacctggcctattcctcccaacaactctgtgaggtagttattatcctccccatcttacagatgaagaaactgaggctggggtaggttaggcagtttgctcaaggtcatgtaggaagttctaagaaacgcagagacctctgcctccagagccctttcttgctatcacactaaagcaaactacgagctaaatcttctctctctgagccccagttatctctgtaaggattgctgtgaaaagaaattgaggtaatgttttttctaatggtggaagccaggcatcttcagaggtgctgcagaaacattctgagagaatggccttctactgcatatagaacaaggccatgagaccaagagccctgaactggaaagtgctgaattttagggctgtctctgccattaagccctcagtgtgcctctgagcgagttccttcctccttctatgcctcagtttcctcatctgtccaattttgagctaacagacacgagctctaaatccccttccaggccaaagcgctaggacacagttgaggttagtcataccctacaaggctgctccaacctcagccaccagcaagagtgagccaaagactccaaatggttttcctctggatcagcccccacccccagcacctgagagtccaggctggggcagaagggggtgccagaggagggcagtgctcttcccagctacccctctgcctcatccataccaaggtggcccttggccctgcttgccaccccacagcccctacggtggctacactgcaaggcctgggagccaggacccagggccagccccagccctgcccctgtctcgcggtgtgacctggccagtctccttcccaccctgagcctctgactcctcttctggaatgaagggtttgggtggtgacagggaaggctcctgtatgctctgacatttattatttcaggatcccctggcctcttgctgttttccttcctgcactgctggggcctgtgactggccgtgcgccccttggtcaggcctctgcagacgtcttcccagcctgggcacttgtccagcctcaccagctcagccttaccggctgtcccttgtggggtggtgggaagcagggaggaagaggggttgcaagaagggagccacaccctcgatgtatgctgaggcctctgcaaaccccaagtttcctggctgggattttcctcaggagattgcttggcggtgatgagctaagagaacaagaactttgctggactaaccgcggaaggttcctcctacccgacccctggcctcaagccctgaattccacccaatcctggggaagaacctggcctgccctcttggacagagcagcaaacagtacttcccaccttctgggttcccttgttggccaggatgaatccctccctgccccccacttgggcttgctatccatcactggtcccttaaaaccatccctattgaactcttggcaatttcctaaatatgccaaactgtttccagccatcagacctttgctcatgctgctccctctgcctggagggcccttgccccattctgtctagtaaacacttcatctttcccgactcaacttacaggtcaccccctccccaccacaacagaactgatcctgcctacctttattccatcctatgcccactacaggctttcattagagtatcctggcccttatttgccatacatgtctgatctctacggggctgaaaactccagaaaggcagggaatggctcatttacctttgtatctgcagcactcaacacaaaactcaggatgtgggtgttaataagcatgtgtggaatgaatgaatgattaaatgtatgaatacatactagcaaggcccagtggcaatatagaaaagacagcaagggttaaggactccggctttcaagtcatactgtcctaaagtccaaattctggttccagtcctcttagctgtgtgacctgaggcaagtgacacagcttctctgatagatgttccccatctgtcaaatggcataataacagcatctatctaatcagactgaactcagtcaggcatttaagcacgtggcccagcataatacacacagaaagggcttcatggtagctattcctgcccagcagacaccttctctgtatccaaataactggacaggccctgtgttatgatgtgctaatatctgaaaagtgcttacaacactgcctggtgtgtttgtttttcctatttttattgctttttaacacaacccagacaacacggatgaaccttgaaaacactgtgcaactgaaagagatcagacaaaaaaggccacatatagtaggatttcattcacatgaactgtccagaataggtaaagccatagagatggaaagttgtcgggggccggggaaaaggagtggagagtaactactaatcaatacagggtttctttttgggatgatggaaatgttctggaattacatagtggtgatgactacacaacactgtgaatatacttaaggccactgaattgtacattttaaaatggtgagttttatgttatgtgaattttacctgaatgagaggaaatctacctaaaagcaacctaagggattgtagggtgcagccaggactgagaactgctaggtagcctctcagcaaatgttttgttttgttttcgtagagacagggtcttgctttgttgtttgagaccagggtggtctcaaactcctggcttcaagtgatcctcccaccttggcgtcccacagtgctgggattacgggtatgagccaccacactggcctcagcaaatgtttgacaaagaaatgaacaggaggcagagagcaaagggcagagctgagggaagaccctgccttgtccaaaatcaggcttagctgttcattccccaaaacctccaaggtacataaggtttctctttttgctctggtgccaggaccgcacagataatctcaacactcactcatggtaattacctcatccctattgcaattactttcctcttttctctgtatgtttcctgatctttttaactaccctatgtgcaggtgtacttgtgtttacagtaagagggaattttaaaaaattactaagtacctgttacgtgctaggttcatgcttgctagattttctatgtgttatcccctcaaacaaacccataagacaattatcttcatccctaattcacagatcagaaaactgagattcagaaaggttaagtcatttgcccaaagtcacacagccaataggaattcaaacccaagtctgtctgactttagttactggactctcgccacagacctcagccacatccctgtatgctacaggttgtcaatcaacttttcactggcagagtcctcccacccagaaggagaccttgtctagttctctccgtgccctcagagcctgcctttgtacaccacaggcattcagtaaatatggcttaatggattactaaccttcagtgggcatgcaatagcttaccacaatagttttcaccccaactgctcatcagttacctgggaacttctgaactgcacacttgcccaggcctcgcccctgggagattctgattcagtgggtctgggtgtagcccgcagcagctgagattcttaaaagctctttcaaggtctaaaaccagtcaagttagagaaccttcagcagctgttcccagctcagcctcccatgccctccaaagcacctcctgtgacgttggtgaggtggaatcagtttttccagggccctgacctagagtcacagaagccactcactgttcccctgtgggtctcactccctcatctgccctgggcccaagttctaggcccatcgaagggaccttctagcagcatcttgtctgagaatgatatgatcaaattgccttcagggaaagcatgttccttctgctctgacctaaagttacagtttctgcctccaaatctgcctgagtcatctgtctccttgtacctcagtggccagaaacagctgaacactaggcaaggaagtgagcacaaaaaaagacaaatttggggagagaaggagactttgagagacaggctcaaggttgacaactctgggaagaccctcggccccctgtgcagaggctgttggtagggaggaggctggttcagtggagttgggtccccagtccatcctagaaaaccctgctgatcccagggccctagccacaccctatgtctctgctccccttctagggagaacttctcatctgccccctcctcaaatcagtccaggatggtgtggaggcgaaaatggcattaaatctgctcttttttttttttttttttttttttgagatggagccttgctgtgtctgcagtggcacaatctcggctcactgaaacatccacctcccgggttcaagcaattctcctgcctcagcctcctgagtagctgggattacaggtgcctgccaccatggctggctaatttttgtatttttagtagagatggggttttgccatgttggccaggctggtctcgaactcctgacctcaggtgatccacccgccttagtcccccaaactgctgggattacaggcgtgagccataaatctgctcttaaggttcccaatgacctccgtgttgccaaagccagaggctgtgtctctgtcattgtcttattttacctctgggcatctgggcagcatctaacagagccgagcaccccttctcctcggaacacttctctcctggcttctgaggcacaacactgtcttatttccttccttccccactgacagcccgttcttggtctcctttattaattcctcttcctatcccaatctcttgataccgagggtccccagggcttgggtctgggccttcttcgttcctctctctaggtgatcttgtccattccacagctttatttatttatttatttttatttttttgagacatagtcttgccctttcacccaggctggagtgcagtggcgcaatctcggctcactgcaacctccacctcccgggttcaagcgattctcctgcctcagcctccgaatagctgggactacaggtgcgtgccaccacgcccggctaattttttgcatttttagtgagacggggtttcgccatgttggccaggctggtctcaaactcctgacctcaagtggtccccctgcctcagcctcccaaagtgctgggattacgggtgtgggccaccgcgcccagcccccacagctttaagtaccagttcaagcaatggatgcaaatgtggttcaggcagcacctgcatgggaatttccagggtgctggtttaaatgcagattcccagacaatcccacaagctggcaaacttgctgtcaagtacatctgtcattgtgtgccagtctggcatctgacctccttcctatgtctggggacttcctcactgcacaggtcttggcagagttcacctcctgtgaaagctgaaaacaacaaattcttgcttttccagcctcccttacacctaagctcaaccaatcagaagccctcactacagactttgaatcaggagcacagtggaagatccattccaatgctggtggcaaccacagcaatggtgtctagtgttcagggaacagtgacacagcgatggcatttagtgtgtggcagcagtgtcctgccaaactggctcggtggcatgattttggctgagatcctgcctgctgcccagccccagttttccaacttcccagaaattctgtgaactactgaacattccctttcagtgcagcccttttctgcttaaatcagctcaggatggtttctcttgcttgccataaaaagcctaagataccaccactgaatcatactctctgggaatgacgccaagtgattctgacacagatgcaggtttgaaacccacggtctcgatgctaacagctctcaaatgtgtatctccagcccgctcctttgaattccaaactcacatactgccttcttgacatctccacttggatgtctcaagacctataaagatatacagatagaattcttggccaggcacaagtggctcatgcttgtaaccctaacattttgggaggccaaggcaagaggatcacttaagcccaagagtttgaaaccagcctaggcaacacagcgagacctcatctttaccaagagaagaaacaaattagcatggatgtggtggcatgtgcctgtggaagcacgaggattgcttaagcccaggaattcaaggctgtggtgagctatgactgcaccactgcattccagcctgggcaaaagaaggagaccctgtctctaaaaaacaaaaaattaaaaaaaaaaatagaattcttgatttctccccaaacctgttcccctgccagatttccccttctcggtatatggcacccttccatcagaaatttaaggccgggcacagtggctcacacttgtaatctcagcactttgggaggctgaggcgggcagatcatttgaggtcaggagtttgagaacagcctggccaacatggtgaaacctcatgtctattaaaaatacaaaaattagctgggtgtggtagcgggcgcctgtagccccaggtacttgggaggctgaggcaggagaatcgcttgaacccgggaggtggaggttgcagtaagccgagatggtgccactgaactccagcctgggcaatacagtgagactccatcccaatcaaacaaaaaaaaaaaagaaaaaaagaaatgtgggacacaatcttgagcactgcccacatgtactccatcgacaaatcttgactgcttataaaacacttctacaatctgtgcacttctctcctcctccaccaaccacaacccgatccacaccaccatcatctcttccctaaataacagaatggcctccttgggtcctctcctggcccttccaatctagtttccatacagcaactgatatgatctttctaaaatacaaactggattatgctgcttgcctgtgtactaaataaaacttaaactcactaccagggccatcaaacttgaatatggccttgccaccaccacccaaactcagcaggtgccactcttccctttgcccatctcagtgcttttgccccttgggccccctttcagggtcacatatatttcagcttctttactgcctcaggacctttgcctaagaggtcccctccatctggagcacccccataccattattctctatgaatgctcctttttagtttttttttttctttcatttatttgttattcaaccaacattttctgaaaacacactatggttctatggtaaatactagggacacaacagtgagattagtttctattctcatagaagtcaaaatctattgacaaattagatcttaataaaataatattttgtcgggggacagagtcttgctctgtcgcccaggctggagtacaatggcgtgacctgggctcactgcaacctccacctcccgggttcaagcaattctcgtgcctcagcctcccaagtagctgggattacaggcacgtgccaccatacccagctaatttttgtatttttaggagagacagggtttcgccacgttggccaggctggtctcgaactcctgacctccagtgatccatctgccttggggaggctgaggcaggagaatcacttgaacccaggagacagaggttgcagtgagccgagatcacgccactgcactccagcctgagcaacagagtgagactccatctcaaaaaaaaaaaaaaaaaaaaaagaagatgttccttggtgatgaggggcacacgtggaggtgagaggtcgcaccactcattgtgaaaacagctctggaagggagcctgagggaagttaggagtgtggtcaagtatgcactgggacatgaggatctaggctacaggtacaaatgtgtgagtcacctggagatgggaggtaactaaggccacacgtgtggacaagattccctgaagagatgaggacccagaacaaacctcaaagaaggccttgacgaggaggatgagtcttcgtgccacttagtacaatgagcaacttctgacttatttgttctttctgtttgttttgttttgttttggagacagggtcttgctctatcacctaggctagcatgcagtggcaccatcggagttcactgcagcctcaatctcctgggctcaagtgatcctctcacctcggcctcccaaagtgctggcattcaggcataagccactgcacccggctgtgacttatttgtttacctgcttactgttgggctttgccagaagactgtaaggtccacagggcagggactgcatctctaactgagcgatgcatctgcccagtgcctcatacagggcctggcatggagcagtcccccaggcactatgctggcagggccaaccccatccattccttgagcaacatgattgggtccactggtccacaccgcccaacaaaaagtcagaatgctcaattggcattcaaaaccctccaagtcttgctgcacccccttagcattctaatctcatcttttaaatcttttaaactgctgggcacagtggctcacgcctgtaatcccagcactttgggaagccgaggtgggtggatcacctgaggtcaggagtttgagacaagcctggccaacatggcaaaaccccatctctactgaaaatacaaaaattagccaggcatggtggcgggcgcctgtaatcccagctactcgggaggctgaggcaggagaatcgcttgaacctgggaagtggaggttgcagtgagcccagatcgtgccgttgcactccagcctgggtgacaagagtgaaactctatcttaaaaaaaaactccagccaggtgcagtggctcatgcctgtaatgccagcactttgagaggacgaggcgggtggatcacgaggtcaggagaacaagaccatcctggctaacacggtgaaaccctgtctctactagaaatacaaaaaattatccgggcgtggtggtgggcacctgtagtcccagctactcgggaagttgaggcagaagaatggcgtgaacctgggaggtggaggtcacagtgagctgagatcgtgccactgcactccagcctgcatgacagagtgagactctgtctcaaaaaaaaaataaaaaataaaaaatgaaaaaactcctatacctgagttttctaaaggggttcttctatacctgagagtatgcataaatgatctaaaccagggaggtacagaacaggatggacacagcacctctccctggaacctggactgtgtgaaataaagaggaatcgccatagatacttctgaggggattttccaggccctgcccctcttctctgagaagcgccccctcccacaccataggtctcaatggccatgtttaccctgccggtcactttccctccatgacctctgctgatgaaaccaggggtggagacccagccactggacccaatccagaaactgggccgggctgtcaacctctgccaggaacttggaagtgggacatgagactggctcaatctagtgtccggttacctttagacactggcccagtgaggtcatgtgagcatgggggctgtgctttggggcctatgtgatgatgaatgagcgaaagcactgatcagatgtgcagagggaagcagaggcaggagagaacaagaatgacgaagcagctgccttagttcctgacaacttcccagcctccagttccaggccctggagaggtgtacttttacctccggctcttcagtctcatgaggcacctctaattctttaaagccaatttccctcaatattcttctctgacgatcaaaaaacaaacaaacaaatttccctccaacagaaacaagcttgacagggtttatgtttcttgcaaacaatctctaagattacacaatttttacactaaaatacattttacaaagcaaactgtaaaattcacaagaatattaaaaattaagaaggaaatcctttctaaaacaagattcaaaaaagcaaaagtcacaaaggaaaagaaaaatgtaactccaaaacaatttaaactgtgcattataagacctgataccaatttaggtaaacattcccccagccactcccattcccccactgataatatattttccatgaggagatacattgggaagcatgtacatttccatagcaattacctctggggagaatacagggattgagatagttgttcataggccttttctgttatgttttaaattacttattacaaattatgccctggccgagcatagtggctcacgcctgtaatcctaacatttttggaggctgaggtgggcagatcacttgagcccaggagttcaagaccagccgggcaacatagtgaaaccccaaccctacaaaaaatacaaaaattaagccggcgccagtaatcctagctactcaggaggctgaggtgggaaaatcacctgagcccaggaggttgaggctgtggtgagccatgattgtgccactgtactctagcctgggtgacagagtgagaccctgtctcaaaaaataaaataataataaattatgccacttgtccaattaaaactttcttttaaaatttcaaaaatatatacaaaacaagcctttgaagatctcctatttgtggcagactgcttcatctgagacctactggagggggtgtgtccactagcagtttgaggcacacaatatagtatgaattcttagctctggtcaaaatggcttacttggttcccaatatgctctcttcccaccagtctctgaattcactcccttgtcctctccgataaatggggttcatctatccttccacctggaagtgtcacctcctccaggaacttctccctcattgcaccagtccttactgctctctccctctcctgctccacttgcctcttatggcattgactgtacctttctctggggactcaggacaaactcctggggttcttactgatctccctgtaacaggctacttctccctagtcagtcagcaaatcaaagtagcatctttatgtccttagtgtcctttatgtccatagagatggcacagagagctggacagagcccaggcagagcacagcagagtcagagagacccactgtgtgacacagggcagctgcctccactgccctaggcccggtttcacctgttgttgtgaatatcaatgagatgatgggcataaaggggcccaagacaggaagaggctggttgacgtaatgactatcttaatatactccctcacatttgcatggtgcttcataattgaacacaaaaaactttaacaacccagtaaggtaagcagggagtgattaagagatccattttaaggataaaataacaaggttcagagaagttacgtagggaggacagacagatggactttaaaaggaaagagaacaggaccgggggtagaacacgtgggtagaaatgctaactttcccactatccagccgcaggagcttggccaagtctcttggcctctctggacatcagttactccatcttatctgagagagtttctagctggtctctatcttaaaagggtccctcagccctgacattctagtttcctgtgatctgcccagggtccttcccagcaggactgtacaaaagggctgcgagtcccaggacagggtccctagttactcccaggaaaccagtcagaactggaagacttgacttaagaatcagttgcattttgattcagtcaaatagagctacaagcctgggggtgggttagtcaagcccagaactgggggaaaaaattgcagcatcaaactatatgtaaacacaatataatcgcaaaatataaatgcaaatgcaaaaccaaacaggaaacctcagggaagtctaatccaaagttcagactctaactttttgggccctgagatgctgaagagaaaagctgtgtttgggtgccgcaagcctttctgttgtaacaatgaacctctacgtgcaccaaaccaaaaatctgaaggcaaaggaggatgggttttgtcttgcctgaactggggcaaagctgagccctgaacagagcctgctgtggcctccagacccattctaagggtccctcccccaacacacagtgcttacacttacacagccaggcaaggccagatgtatgggcataaatgggcatttctgtccatggataaggttcatattggagccccttctcctgctctaagattctaatgaacaacctggggaggaggatgaaccatgaaatccctaagaatgtggatggcactgagctattctgggtcatgaaatgtgaggctatgaagacaaatctcaggaagctctccaaaggatgggctggacagcagtgtttccctgtgagccccacagtaaaatataacccacatccacaggcagtggactctgcccaaggaaggaagccaaatctgaccggctgcttcttattttaataaaacatgtacccctactatgtgcaaagtagtaggctaggctccgtgagacaaatgagacaaggtgaggctctgtgagacaaatgaagacaaaagagacccaatcactgtctaaagagatctgccgattaatctgacgataatcattccatttatcaagaggcatgggccagtgcagcggctcacacctataatcctagtactttgagaggccaaggcggatagactgcctgagctcaggagttcaagaacagcctgaccaacatggtgaaaccctgtctctactaaaaatacaaatattagccgggtgtggtggagcatgcctgtaattccagctgcttgggaggctgaggaatgagaattgcttgaacccgggaggcagagattgcagtcagctgagatcgcaccactgtactccagcctgggagacagagcaagactctgtctccaaaaaaaagatgcatgctttatatgcattgtctcatgtgaggtacacattattacccccattccacagatgacaggacaggtcacatgcccacgttcacccaaatggcaaactgcagagccagcgtttgaaaaaaggtctgccttggccggcgcggtggctcacgcctgtaatcccagcactttgggaggccgagacgggcggatcatgaggtcaggagatcgagaccatcctggctaacacggtgaaaccccgtctctactaaaaatacaaaaaaaaaattagccaggcgtagtggcgggagcctgtagtcccagctactcgggaggctgaggcaggagaatggtgtgaacctgggaggcggagtttgcattgagccaagatcgcgtcactgcactccagcctgggcgacacagcgagactccgtctcaaaaaaaaaaaaggaaagaaaaaaggtctgccttccccaaagtcgatgctccttccacaatcctctatcacccttacaaagtgatacaaacagactccgagatggagggtcaccctgacaagagagaagaggacagatttcctgacactggcgcagggtgttatgaactactgagctttgtatctgccacgcagtgggtgcctagtacacttaaggtgaagggtggaaggctagagccgttgctgaggtccaaaatgccacccaaattgagggcatcctttggatggggagctgcaaaaacacattattctccgttggaccaaggccacggggtgtctgtcctagaatattctttgcagaggagctgcggaaagctgcagcaggttcagagaagaggaatggaaggaactccgaagagcatgggaatggggtggggcagcctgcaagaccgaaagaaaaggcctgggacgctttgctgggaaagacaaagaggagaggggaggggagaggagacgataaacttgccaacagcccggccaaggtgaaccccggctcctggcgccttcccatccgcattcattccacaaacgcgggccaaatctccgaaccagccgcaagcgggagggggcctctctgcagccggggggaagaaagttcaggactgaggcgggaagcctgcctctcagaaggggagtgactcggggggcacacttgtggggctccgaagatgaaaacgcaaactgaggctggaaggcgctaggcaaacacatatgtgatgaggcggtcacgcggggcacttggggtacgtcccccgacctgtggagtttgtcatcgaagagacctcgaggccccccaaaacggtccctcgggccttcccccgcctcgacggtgaggacgcagctgttggagatgcgctcggtcctcccagacctagggagggggcaggtttcggggcgcggtgaagggccatcgcagctcgggtgcgacacgcctgtggaggtcaaggccaggcccggcgccgacccccgacccctcccgcctcggccccctcacctcctcccgcgccagcgccgcccctcggtaccggggcatcttggcggcgaaggcggcggccccagccggggagctgaggtcctccgcggtgacggccaggaactcggcgacgctgaactgctccggcatggcgggcgcgagcgtggagctgccggagcggggcgcggggggcactgagctgctccgcgctgagccggcctcaccgccggccgggggcgccgtcccggcctccacacgccccgcccctccgcacgccccgcccccgaccctccagccgctctccgctcctcagctgggacggccccgcccccggctcctcgccttcctccaccgccaaggtccaggctccggccccggtcccggccccgcaccgcgtcaggccgcttccccggcccctcgccggccccctaggccacgcccccagcccctcaccgcctcagaccccgccccctggcgcgatgccccacccctggcctcagtagaaactcctccgccttcccccatccctgccccttcagggctctgtcccgtttcatcccgctctgggtcttccaaatcctcctcccttgcacggcccaggctgttccatctccgcgtcgagtcttagagccccctccctcttcctccctcctctgctgattcgttccgagttccccatgacctcgccccttctgccctaccacccccccgccacccttccctcctctctccccagtcccgcccaatctccttgcctcgctccgccccgaatcgccccacccctcctttgctgcgtacgcccagctctcagcctcagctttgcaggcatccggagactccctcctgataacccccgccgccccggggatgtgtggatcggggcccctggctagctgtgtgacttggggaaaattacttctcttctggaacctcagtttccttatctgtacaatgggaagcctgatgcccgcttgattgtgatgttgcgaagaaccgaacacgtgcgtgtactagttccctcttacccgaccatagatcgcacccacgcctttactcttcctgctcctgcctttcaccccttaatctggctcaccatcctttggggcggatgagggatggggttcaggatagaaatccacttaggtttagttctgaagcctgaggtcctctggggaaaagttctccaagtaaaaagctaggaaagcaccgcagcaaggaacattggttttggagtcagaggaacctagattccaatcttggttactttggataaattgcttgcttctctaagcctgcatttccccctcttaaaatggcctcatggtattttaccccacagggcggcgattgagagaatcttttcttttctcgcacagaaaagaaaagaaaagaaaaaatccggaaagatatgcactaaaatgttgcaccagcaacattttatgcactagctgaagacagatatgcactagctgaagacattatgagtaactttcttttcttttggtgaatctgtatatcctaacttttatacaatgaccatatactactgtgtaatagaattaaaagttgacgggagcgatggctcatgcctgtaatcttagcactttgggaagccgaggtgagcggattgttcaggagttcaaggccaacctgagcaacatggcgaaaccttgtctctacaaaatatacaaaaattagcccggcgtggtggctcttgcctgtagtcccagctacttggtgggctgaggcaggaaaatggcttaaacctgggaggtcaagtttgcagtgagctgagatcctgccattgcactccagcctgggtgacaaagtgagaccctgtctcaaaaaaaaaaaaaaagaaaaagaaaaagaaaagaaagaaaaaagaattaaaagttgaaaaaaatgtgtaccatctgatagagacgacaactattccaagagttctttcaaggtcaacttctcctgttgaaaccaaataggcacttttcttgttatttatttttagagacaaggtctcactctgtcgcccaggctgaagtgcagtgcaatgatcatagctcaaggcagcctcaaactcctgagcttaggcacttttcttgcttgacttttaggagcatctgacaatgttaaccactcccttctccttgaaacacccttgcccctgaatcctaggagaactattttctttggtggccctctccctctggctgttccaagagccctttctgagatgcacttcctccgcagggatcttaaatgctggagttgttgggagctctctgctaaatcctctgcatgtctcactctatcagccttcctggatttcttcatccaatcccaacggtaatgttgatgtcttctgtactagtttcctgttgctactataacaaatcaccaataacttccctcagcctcccgagtagctgggattacaggcacgtgccaccacacccagctaatttttgtattttttagtagagacggggtttcgccgtgttggccaggctggtcttgaacttctgacctcaggtgatccgcccacctcggcctcccagagtgctgggattacaggcatgagccactgcgcctggccacatttattcttttacatgtctggaggtcacaagtctgcaataactttcactgggctaaaatcaaggtatcagtggggctgtacttcctctggatgctataagggagcatctgttttcttgcttttgcagcttcgagagctgtagtttttgcattctttggcttatggcaccttccaccttcaagggcagcagcatcttcaagcatcttacttgccttcttccctgtgatcaaatttctcccagcctccccacccctcttctttttgttttttttttgttttttttgagacggagtttcactcttgttgcccaggctgaagtgcaatggtgcgatctcagctcaccacaacctccgcctcccgggttccagcgattctcctgcctcagcctccagagtagctgggattacaggcatgcgccactatgcccggctaattttgtatgtttagtagagatggggtttctcaatgttggtcctcgaactcctgaccttaggagatccacccgcgtcggcctccgaaagttctgggattacaggcatgagccacggcgcccggccccctctttttttttttttttttttttttttttgaggcagggtctcattctgtcactccaagcagtggagtgatcacagctccctgaagtctcaacctcctgggcttttgcgatcctcccacctcagcctcccaagtagctgggactgcaggtgcatgacaccacgcccagctagttcaacctctctcttttttttttttttttttttgagacgtgatgcctctctgtcgcccaggctggagtgcagtggtgtgatctcagctcactgcaacctctgcttcacaggttcaagggatttttgtgcctcagcctcctgagtagctagaattacaggcccatgccaccacacccagctaattttttatttttattttttatttacttatatttttattttttgtatttttagtacagacagggtttcatcatgttggccagactggtctccaactcctgacctcaagtggtccacccacctggacctctcaaagtgctcagcctccctcttataaggacatttgtgattacatttagggcctatccagataatccaggataatctccccatctcaaaatccttaatttaatcacacctgcaaaatctcttttgctatataagtgccatttacaggttccatggattaggacctggatatctttgggagccattactgagccaatcacatcttccaaggctgtatttccagcctggactcttctctagttcaagatctatgtatccagccacctatgagacagtttcatttcactggctcacagacagacaccttaaactctacaggtccaaaactgaactcaccatctcgtacgcccactccttgcaccagattgttttctgtccctgtcttgatggaaggcattaccatgcaccccctcggagtcatcctctcctcccttcttctaccaacctcccctcaaacaagtcttgtcactagtctcaccagtgagaccaccttctccatctgcaggccaaccccagtccagaccactgccacctctcacttcctcgctggtctccctgcccctaatcttgcatatctgttctgttgctcctctacttagaactcttcagtgccccccgcattgctctctgaataaaagccaaacttgttttcatggatgtctagccctgcatggtcttgctgctcctgccattcacaggctgatctcttgcctctctgtccccactgtgattgagccccttcactgttctcccctccgtctgtaatgctctcccacgtcctttcagcaggccaacttagatgtcaattcctccaagaacccttccttgatgtacttactctggactcctacgggatccagtatctcccaccacagcaattaccactgtggactgtaataatcagttttctggtctggggctctggcccacctatttatttatttatttatttactacgtactagtcacagggccaagggctatacaagcaatagctcactcaatacccactcaatactcacagcaaccctatgaggtaggtgacgttatgcttcccatctcactgaaattaaagcttagagagattaatttgtataaagtcagaatgaacaagtaatataaccaggattccaacccaggtctgcaagactttaaagccttctttgttttgttttattgttattattttgagacagggtctcactttgtcacccgggctggagtgcagtggcatgatcatggctcactatagtctaaacctcctgggctcaagggatcctcccatctcatcctcccaagtacctgggaccacagatgtgtgccaccacactgggctaacttttaatttttatttatttatttatttatttttgagatggagtcttgctctgtcacccaggctggagtgcagtggctcaatctcggctcactgcaagctccgcctcccgggttcacagcattctcctgcctcagcctcccaagttgctgggactacaggtgcccaccaccatgcccagctaattttttgtatttttagtagagatggggtttcaccctgttagccaggatggtctcgatctccctcccgatctcgtgatccgcccgccttggcctcccaaagtgctgggattacaggcgtgagccaccgcgcctgccacttttaatttttatatggaggtcggggggcaggggtctcactttgcccaggctggtctcgaactcttgagctcaagtgatcctccctcctcagcctcccaaagtgctggaattataggtctaagccactgagcctggccattctctctctctctctttttaagtaaaataactttttgtttttacttaaatatgtgaacaattcaattacagtgaaattttttctgaacctccaggtttagggtaatctttaagtaatctataggtatttgatattatgtcatgcccgactatgtttatattggatcaaaatagagaaggagagaaaactgtaaggattccaagtgtttgatatacctaatgcaaatactgtactttcagtgccataatttttaaaatagaacctctcaagatagcttatcctcatttctgcatacaatcaataaatagagactcaggagcaactgcttgaacagtcctctgctggtaccgttaccggaaaggggtccagaccccaagagagggttcttggatctcacacaaagtccataaagcgaaagcaagtttattaggaaagtgaaggaatacagaatggataacctacaggcaaagctgcccccaggggctgctggttgcgcatttttatggtcatttattgattatatgctaaacaaggggtggattattcatgagttttcccggaaaggggtgctcagaactgagggttcctcccctttttagaccctatagggtgacttcctgacgttgccatggcatttgtaagctgtcggggcactggtgggagtgtctcttagcatgctactgtattataattagcatataatgagcagtgaggatgaccagaggtcactttgcagcaatcttggttttggtggattttggctggcttctttaccacagcctgttttatcagcaacgtctttgtgacctgtatctcatcctgtgacttagaatgtcctgctttctgggagtgcaggccagtaggtctcagccttattttacccagaccctattcaagatggagtcactctagtttaaacacctctgatggtattattagattcttgtgcttgattttggttcactggcaaactgccatgtgccaagaggagagtcctctggggtgaagcagttgggagggtaagaaatgagctcagagaggtcctgggatgcttgctctctggagcaagtttttttccagataaaatcaaaccatcaaggggttgggcacaatgggcaacatagtgagacttcacttctacaaaaaatttaaaaattagtcaggtgtgatggcacgtgtctgtagtcctgctacgttctgctacttgggaggctgaggtgggaggattgcttgagcccaggagtgtgaggctatacacagctttgatcacgccactggttagagacagggtctcgctctgtcacccaggctggagcacagtggcatgatcatggctctgtaaccttgaccaatcctcctgcctcaacctccagattcattgcgactacaggtgcatgccaccatgcctggccttgctatattctcttaaactctgcctgatcagaattttgctcccaccagccactgaactgctctcatcaaggccaccatgacccccccacctgctgaacccagaggtcagtgctcagtcctcatcctgcagcccctccagcagctgcctaatgtctcccccatttctttacttggcctcaagacaccacactgctttgattttcttcctctcgtactggtggctccttcttgaactccttggtttgttcctcctcttctttctgatttctcagcactgaggactcctctccactctccatgctcactcccttgggattccacccagtcccatggctttaaatatcatctagatcctggtgattcccaacttgtaactccagcctggaccctctcccttgacctgcagattactatatccaactgcctccagacacgtctgcctggaagtctaaggggccatcttgaacttaacctatgcaaagctgaattcctggcttccctacccaaagtacctatgcatacacacatgcacacacgcacgcacatgcacatgcacacacctcttcctcatctaaactggtggcaacttccattttcttcttcttcttttttttttttttttgagacagagtctcactgtgctgcccaggctggagtgcaatggcataatctcggctcactgcaacctccgcctcccgggttcaagcaattctcctgccttagcctcccgaatatctgggattacaggtgtgcgccaccatgcccggctaatttttgtattttttagtagagacagtgtttcaccatgttggtcatgctggtcttgaactcctgacctcgtgatccgccagcctcagcctcccaaagtgctgggattacaggtatgagccactgcgcccagcccacaacttccattttctagcgttcaggatgaacattcttgactcttctctttctctcacaccccacatcatgaaatccattggctctatccctaaaatatatctagaacgccactcctcatcactgcaccgctagtggcctggtccaagccattgtgatctcttgcccggatcactgcaggagccttcattgtgctctctgcttccaccctggctgctctacagcctattcttttttcttttttcttttttttttttttttttgagagagagggtctcgctctgttgcccaagttgtagtgcagtggcaaaatcttggctcactgcaacctcccaacttcaagcaattctcatgcctcatccttccaagtagctggaattacaggcatgtgccaccatgcccagctaatttttctatttttagtagagatggggcttcgccatgttggccaggctggtcttgaactcctgacctcaagtgatccacccatcttggcctttcagagtgctaggattacaggtgtgagccaccatgcccggcctacagcctattctcaactgagcagcaagtgactctgataccagatcatgtcattgcactctgcaaaaccctctaatgcctctcactcaagccaaaagccaagccttgcatggcctgaaggtcttacctaatctgccttcctctgacctcatcccttctcactctccctctcctcccctgctccagtcacattgacttccttagtgttccttgaatatacttggcacacttgtgccccaggacctttgcactggctgctcctcctgcctggcatggtcttcccacagatatccacatggccagtgttctcacttctttctgccaagtcttagcccaaatgctaccatctcagggaggcttatcctgaccacccaatttaaactgctattggccaggtgtggtagctcacgcttgtaatcccagaactttgggatactgaggtaggcaaatcacctgagcccaggagttcaagatcagcctgggcaacatggcaaaactccatctctacaaaaaatttgctgggtgtggtggcacacacctgtagtcccaactactcgggaggctgaggcaggaggatcacctgggccaagggaggttgaggctgcaatgaactgtgactgcaccactgcactccagcctgggcgacagaatgagatcctgtctcaaaaaacaaaaagactatgatgatgatgatgatgatgatgatgatgatgatgattatttgagacagagtctcaaattgtcacccaggctggagtgcagtggtgtgatcttggctcactgcaacctccacctcccaggctgaagcaattctcgtgcctcagcctcctgagtcgctgggattacaagcgcacaccaccatgctcggctaaatttttttgtatttttagtagggaccaggtttcaccatgttggtcaggctggtctcgaactcctagcctcagatgatccacctgcctcagcctcccaaaatgctaagattacaggcatgagccactgtgaccagtcaggatgatgattatgttaggtctacctagataatccaagataatcacccatttcagggtcagctgattagctatcttatcacctgtaatcttaattttcccttgccatgtaatatcacatattcacaggttcgggggattaggacattggatatcttttgggagtggggcattattctgcctactgtgatgggtaagtaagaaaacactgttggccaggtgcagtggctcatgcctgtaatcccagcactttgggaggctgaggcgggtggatcatgaggtcaggagttcaagaccagcctggccaagatggtgaagacccgtctctattaaaaatacaaaaaaattagccgagcgtgatggcagctcggctgagtagctgtaattccagctactcaggaggctgaggcagagaattgtttgaaccaaggaggcagaagttgcagtgagctgagatcgtgccactgcactccagcctggacgacagaacgagactccatctcaaaaaaacacaaaacccaaaaaaacgacaacaaaaaaaacactgttgttgggcaatgacatatagggactttgagctatgagtatacctgtgctcaaaaagctaccagggggccgggcgcagtggcttacacctgtaatcccagcactttgggaggccgaggcgggcagatcacgaggtcaggagatcaagaccatcctggctaacatggtgaaaccccatctctactaaaaataaaaaaaaaattagccgggcctgatggcgggagcctgtagtcccagctactcgggaggctgaggcaggagaatggcgtgaacccgggaggtggagcttgcagtgagccaagatcgcgccactgcactccagcctgggagacagagcgagactctgtctcaaaaaaaaaaaaaaaaaaaaaagctaccagggatcagggatccccactgcttccaggataagggcaagatctctcagcctagcaggcaaagcatgtcatgaattgacctatattcccattttatgaacaggtactttctggcttccttgcttccactctacctgaaagcccttttcttccatttatgatcttgaaagtccttccattgattatggtcaagttcaaatgttgcctcttccatgaaaccttttcagaacccccagaatgagtctccctccactgttgctactgtggaatttgtcttgatgggagtcatttgtgtatgtaccagttgggggtcgttcccatctaagcgtgggcacctggaccatggagtccacctcagcataggtcagcagttctcacacttgagtgtgcatctgaatcacctggaggacttattaaaatgcagactcctggggccaacatccagaatttcagattcagttgatgtgggatgggacctggtcatctgcatttcttttttttttttttaagacagagcctagctctgtcgcccaggctggggtgcaatggtgcgatctcggctcactgcaacctccacctcccgagttcaagtgattctctcctgtctcagcctcctgagtagctgggattacaggtgcccgccactgcacctggctaatttttggtatttttagtagagacagggtttcaccatgttggccaggcttgtctcgaattcctgacctcaggtgatccgcccatctcggcctcctgaattgctgggattacaggcgtgagccaccatgcctggccagtcatctgcatttctaacaactacccaggtaattctgatgctgctggtctggggagtacactttgagaaccacaggcacagaagctgagatgttgtcatcaggctagacctggcttcaaatctcagctctgcctcttactctgtgattctggatatgtccctatccctctccgagctgctttctcatctataaaaggattcatcttcccctccccactggggtgatgtgaagagtaacaggcttaggacaattccaattaggacaattgcaggttcttaataaaaggcctgaagctctacctctaaaattttcctccccctgtgttttggcttcctagtaggtgctcaataaaaacttgtgaattggttttaggggaaactactgccttggacacttggaaaaaaggtgctggcagccgggcgcggtggctcacgcctataatcccagcactttgggaggcagaggacagcggttcacttgaggtcaggagttcaagaccagcctggtgaaaccccatctctacttaaaaaaaaaaaaaaaattagctgggcttggtggcgtgtgcctatagtcctggctactcgagaggctgaggcatgagaatcgcttgaacccaggaggtggaggttgcagtgagccaagattgtgccactgcactccagtctgggcaacagagcaagactctgtctcaaaaaaaaagctggcaacatgagaagtggtgggtatgtctgggtcaaaggaatgaatgaacttcacactggtgagcattttcctgacaataacaatcacgtcagaagtgacagcagatcaactgtattgcaagttcatggttatttatccacaaaagcttccctagtacctccaaggaacctggtggctggtggccctgccagggttacagagctcaagggaaggtggtggtcctcaaagggctcagaccatgaggaagatttgtgtaagtagagaaataatgaggccaggctcatacctgtaatcccaaaactttgggaagctgaggcaggaggatggcttgagcccaggagtttgagagcagcctgggcaacttagcgagaccccatctcttaaaaaaaatacaaaaattagccaggcatggtggtgtgcatctatagtcccagctacttgagaggctgagataggaggatgacctggacccgggaagtcgatgctgcagtgagctgtgattgtgccactgcacttcagtctgggcaacagaggtagaccctatctcaaaaaaaagaaaaagaaaagaaaaaaaaaaggggccaggagcagtagctcacgcctgtaatcccagcactttgggaggctgaggcggacagatcacaaggtcaggagttcgagaccagcctggccaatatggtgaaaccctgtctctactaaaaatacaaaacttagctgggcgtgtggcgggcacctgtagtcccagctacttgggaggctgaggcaggagaatcgcttgaacccgggaggcagaggttgcagtgagcccaggtcgtgccattgcactccagcctgggcgacagaacgagtctccatctcaaaaaaaagaagaagaaaagaaagaaataacaggatcaggcttgtcccagggacctgaaagtacagcctagtagtggtggtgggataggggattgctggccttagggcacgcattgtctgggaagaggattccctgtggctgggacactgcctacaggcttccccaagggcctgtttccttagaataccaaatacacacacatgcaaatcgtgctttctttgctgctcctgaagccaggtgtcttctcacagtttatatttgagggaccactagtcaaactgtttgtgggcaaaagactgtgtctttgtttccccagaatctggcagtgtacacacacagaaaatcttaaaggtcagaatggagcccccataatgccagttaggaggctggaccacatggaagtcacaagcatggcccttggagcttagatggccacgttgcagtctggttgtatcaccaggaccgggactagggtgaggcaggtgaagtgcctctcttgctcacccttactagctgtgtgacctcacataagtaaattcacctctttgagcctcactggcaataataatgcctattctataaggtttttgaaaagattgcatagaataaaacctggtcactaaagagatctcaataaaaggtagcttttcccaatttctgcatttggcagagtggccagcagagggcagtggtccccatgctgggaaaataacctgcctgggcagaggcctagctagcgctgacggggcaaacagttcgagtggtcagggatccctttaattgagggactacacgctccaggaaggggtgtgtggccataactgggtcaacacaaccactagccaacagatacactgggcatcctgctggtcaccctttgctgtggtcacttgtttcaagcgattctcttgcctcagcctcctgagtagctgggactacaggcacacgccgccacgcctggctaattttttgtattttagtagagacggggtttcaccgtgttgcccaggctggtggtgaactcctgagctcaggcaatcctcccgcctcagcctcccaaagtgctgggattgtaggcgtgagccaccacacttggccctgttctacatattttaaccatggagccacctggccttttcccaaacagctccttctgcctgctgtgcagccttctccccttctttccttaggcaagcatctccttcaggccccatccccaaccctctctgagtccatctttccatagatgagcccatccgagctcccagagcattctattcttccttgatggtggcatttataacactttattaaacgacatatttataagacatgaagtttggctagaggttaagagtagggtttcctggggctgcatggcctgggctctatcacatgttgtgtgactttgtacacattgcccaacctctctgagtctcaatttcctcatttgtaaacatggggctaataacaatacctactttatagggttttgccagaaaccatttagccataacttttaatggcaaaaaccgcaattacttttgcaccaacctaataaatgattttgttgttgttgtttgtttgtttgtggttttttttttttggttgtttgagatggggtctcactctgttgcccaggctggagtacagtggcatgcttatgactcactgcaccctagaccttctgggctcaggtgatccttccagctcagcctctcaaagggctgggactacaggccaccaccatgcctggctaattttttgtattttttgtagagatggggtttcactatgttgtccaggctggtctcaaacacatgggcttaagtgatccatctgcctcccaaagtgctgggattacaggtgtgagctaccacgcttggccggaagctaaatgatgttatgcacacgaggccctaatttgttgaataaatgaatgagcaagtgagtgaatccactgggctgtgagctcctcaagaataaggattgttttctttcttttttacattttgcaatgtctgaatcccagtgtgggcattgcatgttatctggtgcggtggtcctcctgaccagtattctcaacatcaccttggagcttgttagagatgccctttttttttttttttttttttttttttttttttcagatggagtttcactcttgttgcccaggctggagtgcaatgacacaatctcagctcaccgcaaccgccgcctcccaggttcaagcaattctctggcctcagcctctcaagtagctgggattacaggcatacgccaccacacccggctaattttgtatttttagtagagacagggtttctccatgttggtcagactggtctcgaactccccacttcaggtgagctgcctgccttggcctcccaaagtgctgggattacaggcatgagccaccacgcccagcccagaaatgtccatttttaggtcccacctgtgacctactgaatcagaaattctagggatggagcccagcaagctgtactctaacaagccctctgattctgatgagcgctaaagtttgggatctacccagccagcacatagaggctcaaaggtgtttgtctaaatatatgttcaaatccataagctttatgtggtttgaattagaattggctgtaagctccataaaatgagggggcatggtttccctagcaccaggtagaggcaggcgcatagtagatgctcaaaaaaggtttgtgggccgggctcagtggctcatgcctgtaatccctcctgcttgggaggcagaggcaagcagatcacttgaggtcaggagtttgagaccaacctgtccaacatggcaaaaccccacctctactaaaaatacaaaaattagccgggtgtggtggtgggcgcctgtagtcccagctactcaggaggctgaggcacgagaatttcttgaaccctggaggtggaggttgcagtgagccaagatcgtgccactgcactctagcctgagcaacatagcaagactctgtctcaaaaaaaaaaaaaaaaaaaaaaggaaaagttttgtgaaacaaatgaacaaatgagtgaagagcccttttggttctttttatggttctcagtatcttagattttccaaagttcagtttcattacctgttctctcttccaggatctgtggaaggatctacaagcaaagtaaacagcttaatatacaaaacaaaaaagtattgtcacactgttgagcactttgaaactctcagttagaacccccgaaaggtctggttttctatccctgctgcaactcagagcttgaggcacctcaagaatcctgctgcggccgggcacagtggctcacacctgtaatcccagcactttgggaggccaaggcaggcggatcacaaggtcaggagttcgagaccatcctgactaacacggtgaaaccccgtctctactaaaaatacaaaaaattagccaggcgtggtggtgggcgcctgtagtcccagctactcgggaggctgaggcagtagctgaggctgaggcaggagaatggcgtgaacctgggaggcagagtttgcagtgagccgagattgtgccactgcactccagcctgggtgacagagtgagaccttgtctcaaaaaaaaaaaaaaaaaaaaagaatcctgctgcagacgcacacctgccaggccttggccacccagggaaagaggaagcaatttcttaaggcaggtaaacacccttgacaaggagggagcagtagttatgaccccaccttggaacagggtagatgcccaataaatgtctgataaataaatggcacttgttcaggacagcattgtagttaattgcataagttcgaaacagactggcaggggcttttttcttattccttgttttattgctttgtccgggatcactaatacgatgttgatttgtaggaatgatactggatgtccttctctcatttctaaagtttcaccattaagtttgatatttgctgtggaaagtaattcctgtgtattcttatttagctatcaggtttctaaaaaccgtgaatgagtgttgaatttttcaagtgtttttcctgtatctatggagatggtcacatgggtttttcctttaacttgttaatgtgaagggttgaactgattgctaaataagaatacccgggaaccatcaccatatcacttttagaatattttaatcacacccccataagactctgtgtccattagcagtcttctcccctccccaacaaccttaaataaccatgaatctctataaatttgcctattctggatattttatgtaagtgagatcatataggttgggcatggtggctcacacttataatctcagtactttgggaggccaagccaggaggatcacttgaacccaggagtttaagatcaacctggggaacatagtgagacttcgtctctataaaaaaaatcaaacaattagctgtaggttggttttttactttcttgatgatgtcctttgcaacaaagaagtttttaattttaggctgggtgtggtggctcacgcctgtaatcccagcactttgggaggctgaggcgggtggattatgaggtcaagagatcgagaccatcctggccaacatggtgaaactccaaatacaaaaagtagcctggcgtggtggcaagcgcctgtagtcccagctacttgggaggctgaggcagcagaaccacttgaacctgggaagtggaggttgcagtgagccgagattgtgccaccgcactccagcctggcagcagagagagactccatctcaaaaaaaaaaaaaaaaaaagcttttgattttaatgaagtccaatttatctattttcttccttttgttacttgtgcttctggtgtcatatttaagaaattattactttgagaggtgaggcaggaggatcacttgaggccaggagttcaagaccagcctgagcaacacaggaagaacctgtctctataagaaatttaaaaattaactaagcatggtggcaggcaagtgcctgtagtcccagctacacaggaggctgaggcaggaggattgcttgatcccaggaggtcgaggctgccgtgagttttgttcacaccactgcactccagcctgggcgacagatgagaccttgtctcaaaaaaaaaaaaaaaaaaaaagtaagaaattgttgcctaatataaggtcacaaagacttatgtctatgctttttcctaaaagttgtatagttttagctcatatatttagatctttgattcatttctgagtcaaattttgtatatgttgtgagttaggggtccaacttcattcctttttttttttttttttgagatggagtctcgctctgtcacccaggctggagtgcagtggcgccatctctgctcactgcaacctccacctcccgggttcaagcaattctcctgcctcagcctcccgagtagctgggattacaggcatgcaccaccatgcctggctgatttttgtatttttagtagagatggggtttcaccatgttggccaggcttgtcttgaactcctgacctcaggtctcctccttcttctttcttcttcttctctctctttctgaggcagggtgtcactctgtcactcaggctggagtgcagctccatcttagctcattgcaacctctgcttcctgggttcaagtgattctcctgcctcagcggccaaagtagctggaaccacaggcatgcaccaccatacccagctagttttgtttgttttttgtagagactaggtctcactatgttgcccaggctggtcttgaactcctgagctcaggtaatccacccgccttggcctctccaagtgctgggattacacgcgtgagccaccgcgcctggcctactttttgtctttgtaggtttttctattcttcatgtctcatgtacatggaatcatatgtgattttttgtgactcgcttctgtcatttagcaccatgtttttgaggatcatattgtagaatgtatcagtacctcattcctctatatagttgaatagtattccattgtatgaatctaatacattttgtctttctgttcaccagttgatggatatttaggtatttccagtttggggctattacgaataatgctgctagaaccatttgtgtccaagtcttgtctttgcatagacatatgttttcatttatcttgaagcagaaatgatcctactgcaagtagaataattctatacctaggagtaaaattactgggtcttatggtagttttatgtttatctttttgaggagctgccaaacttttccaaagtggctacaaattttacatccccaacaatgtatgaggaacttcaacaatgtattgggaacttctgagtgtttcctcatctataaagtgggaataagagtaactctgatttcctgaggttgttgtgagcattaaatgagattatggtgtatgaaggccaggaaaccttccaaaatgaccaaccccctcccaccaactcctgtaatgtataccagtcactacaattgttacattatttataattatatttttatgtgtttgtgttttgtgagcatcctgaaaatgggaactaggtcttattcatatttatcttctcagtgcccaacatgtaatattcagtaagctataacaatatccatgtacaaagtattaatgattacacgttaatgtcaagaaaactacaaaaagctctccctctccctctccctccccctccccctccccctccctctccccgtcccctctttccacggtctccctctgatgccgagccgaagctggactgtactgctgccatctcggctcactgcaacctccctgcctgattctcctgcctcagcctgcctagtgcctgcgattgcaggcgcgcgccgccacgcctgactggttttcgtatttttttggtggagacggggtttcgctgtgttggccgggctggtctccagctcctaacagcaagtgatccgccagccttggcctcctgaggtgccgggattgcagacggagtctccttcactcagtgctcaatggtgcccaggctggagcgcagtggcgtgatctcggctggctaaaacctccacctcccacccgcctgccttggcctcccaaagtgccgagattgcagcctctgcccggccgccaccccgtctgggaagtgaggagcgtctctgcctggccgcccatcgtctgggacgtgaggagcccctctgcctggctgcccagtctggaaagtgaggagcgtctctggccggccgccatcccatctaggaagtgaggagcgcctcttcccggccgccatcccatctaggaagtgaggagcgtctctgcccggccgcccatcgtctgagatgtggggagcgcctttgccccgccgccccgtctgggatgtgaggagcgcctctacccggccgcgaccccgtctgggaggtgaggagcgtctctgcccggccgccccgtctgagaagcgatgagaccctccgcccggcaaccgccccgtctgagaagtgaggagcctctccgcccggcagccgccccgtctgagaagtgaggagcctctccgcccggcagccgccccgtctgagaagtgaggagcccctccgcccggcagccgccccgtctgagaagtgaggagcctctccgcccggcagccgccccgtctgagaagtgaggagcccctctgcccggcagccaccccgtccgggagggaggtgggggggtcagccccccgcccgggagccgccccgtccgggaggtgaggggcacctctgcccagccgcccctactgggaagtgaggagctcctctgcccagccagcagccccgtcccggagggaggtgggggggtcagctccccgcccggccagccgcccctactgggaagtgaggagcccctctgcccggccaccacccggtctgggaggtgtacccaacagctcattgagaacgggccatgatgacaatggcggttttgtggaatagaaagaggggaaaggtggggaaaagattgagaaatcggatggttgccgtgtctgtgtagaaagaggtagacatgggagacttttcattttgttctgtactaagaaaaattcttctgccttgtgatcctgttgatctgtgaccttacccccaaccctgtgctctctgaaacatgtgctgcgtccactcagggttaaatggattaagggcggtgcaagatgtgctttgttaaacagatgcttgaaggcagcatgctctttaagagtcatcaccactccctaatctcaagtacccagggacacaaacacttcggaaggccgcaggtcctctgcctaggaaaaccagagacctttgttcacttgtttatctgctgaccttccctccactattgtcctatgaccctgccaaatacccctctgcgagaaacacccaagaatgatcaattaaaaaaaaaaaaaaagaaagaaaactacaaaaaaagattcttgaactgggccttcaagaataagtaggcacccactcagctcaaatggagcacagggcatcctaggtggaaggaacagcatgtggacaggcccagaagagggaagacgtgtcgatttcaggaaatgacaaggaagcccagtgtggcaatggtgctgggaaagggtggccagggaggccacaggtaaggtagaggaagccagttggaagttgtaaatagccatttataccatgcaaaagggttagaacttcatcccgagggcagagaggagccatggatgggcattaagcaggagagtaacgcgattagaactacattttagaaagatctttctggggatcgcttctcagccttttggctaagatcaagtgtagaaagatctctctggggcagcagaaggcatgcattctcaaacttcagctgcattagactcacctgggaggttcatggagcctcagaatactgagtcccgccccatgagtttcttattcagcaggtctgaggcaaggtctctttttttttttgagacggagtctcgctctgttgcccaggctggaatgcaatggcgccatctcggctcactgcaacctctgcctcctgggttaaagtgattctcctgactcagcctcctgagtagctggagttacaggcgcctgcaaccatgcccgctaatttattttatttttttagtagagacggggtttcactgtgttagccaggatgatctcaatctcctgaccttgcgatccgcccgccttggactctcgaagtgttgggattacaggcgtgagccactgcacctggcctttttttttgcagagtctcactatgtagcccaggctggagtgcagtggtgtgatctcactgcatcctctgcctcctgggttcaagcgattctcctgcctcagcctcttcagtagcttggattacaggcacccgccaccaagcccggctaatttttttatatttttagcagagatggggtttcaccatgctggccagactggtcttgaactcctaacttcaagtgatccaccgcacccagcgtgaggcatggtcttgaatatgcatgtctcacatttccaggtgatactgctgctgctggtctgaggactacagttggacccactgatgtagagggtgggagggagagtgtgggcagcaagacctttcaggaagctgtggaaatagatgggggagacagagtcagggctgatcacattttagatctgggtgctgcgaacttttcagtgccttaatggtgagattgcaggcatggtgataagagactgtatcttggagggaaatccactgggcaatcatgtgcccccagcattggccaggacagcccccaacacccagcctgcggggaccagatccacagttggtaatgagcttcagaaagcacgacaaagacaagatgcccagagctgcagtttaatgtttaatgcccaattatctcaatacaaggaggcttacatggtgctcataaagacacgaccaggcgaaaccaggccggcaggaaatgacccgcatgagtcccagcacggggaccatgttctctcggttccagctcaccctcgaaaagtgccacaggcaaggttcttcagctcacccaggagccagcaggctggccaggcgtgtggccaccatggtcactgaggatcctcgtgggagaatagggttctgggacctcaggatacaatcacaagaaccagaaagctgcttccaaacaaccccagaaggttttcacttcacatgcgctaagccacacaacacctggatgctggggcacccaaaccctttccctaaaactctgaacactgcagaatggaggttgagaacacttggggagggagaacaaagtcagaaccatcctaaagccagtttttcaagcttgaccacctccctcttcctccctgaaggcacaccagccgatcccattactgtggaaaagggacaccctctggtctattctaacacctttaatgggaaaggagttaggagcatgtccctggcttcaagaaatctctgaatctccaactctactggatgatttcctggagccccaagctttagaagtccctggggacacgagtgatttttttaggggggctgctggtggggctgggaagtttcctggcagaaattatttacctcagaaagacactggcttttctcttaccctcgttttaaagtctacctggtccctaaagaaaataccactcaggctgggcctggtggctcgtgcctgtcatctcaacactttgggaggccgaggtggtggatcacttgaggtcaggagttcaagaccagcctgactaacatggcaaaaccccgtctcgaccaaaaatacaaaattagccgggcgtggtggtgcatgtctatagtcccagctactctggaggctgaggcagaagaatcgcttgaacctgggaggcagaggttgcagtgagccgagatcaggccactgcactccagcctgggcaacagagcgagactccatctcaaaaaaaaaaaaaaagaagaaaaaaagaaaagaaaataccactcaaaatgtgtcctgaagcactctgtggaagtcgggaggcttcaagtgtcactggcaagacgggggcatgagcttgtgtcctgcactgaatctgaggcttagcctgggaggtctagccccttggccaggcaaggtgtgaaagggacagtagagggggacagaggcagctgctgagcacacggggcacaagcctgaaggcagctcccctgaccagccatatggagaggcctctagggcatgagcttacattccagacttcagtattaaactcattcccaatgggtcctgcaggccccttcttccttttctctgatgtaattcttggggaaagctccagagcccaaggaatgggagtcaaacacctctgacttcagagatggcacatggctaaatggcagcccagtggagacctcagagcagcccactcaccacaaacgagatcctacacagggtccctgagcatgctggactttaagacgggcgtctgataagacccttgtgagtatttgggtaggagaccaaaagcatttctgcaaagggtacacaattagccctgcttatagagtgggggcagctgtgacccgctgaccactcctgggagggggctaacttgggggcccaggaatttgagcaaatgatgaggcacaattgtccccagctgggcattagatcacattgggccccaccctgaaataatccctcgtctcaaacttcagacatcagtcagtcagctcaggagccatccaacaaaaccaacttcatattttaaaccagcttaatgctacaaacttttctaaaaagtgctgtccagctgagcctctgagaaaacctagctccctgaggggtggatggcaggcctctcagaccaacccctgagcctctctccagaagtcatagccttggttcagcccagagcacccacatcccagggtgggtgggggagaagagcagctgagctgaagggacaatgtgggatgatcaagcctctgggggaacaggctgaagccaaaagaccccctcaggaccccaggcctgcagaggtaacatgagttcctctccccattagctgtgaaggcctggtctgccatgaagacctctctctgtcaccccttcagtatacctgggaaaaaaggagtgaacaagtcaccaagccccagtcacctctgtccttggggtctgagtgagctctgaggggtggagtccttaatgaaccatccccttcaataacatggtgaaaaaattcctcccagggaagcagagaatgatgccagtgccacatggggggcagaggggatgcttttggcagttttttgttttaatctgacccttctttacagtggggctgcctctgcctaccaagtccttggtgcaaaatggctcctggaccagcgcaaggcagaaactctgaggaaaagtgcccgccacagccatgacagctgcccccatgctcctgtctgttttccacgggagcttgtctctgctggaccatttttacatctcaaggggagaggtaaggacttcctcaggaaaggggtctcctgagcaggtggctcctgtttccacaggagcctcagtgctacctgccctaggatggctccctgggaccatctctgggacagaggcgaccaggaagccaagaccggcagctcagctggagatgtgaggccaagaacaggggaagaggcaaaagggcccacagctgccgtttactagaaccatgaggcctaagtgcaattagcattctagcagactggacagcccctcagagtcccagcccccaccacagtggggaaaccaaggatgtagcctgggcccctcccttggaaacccagacctgccctggaacatggacagtgatgggcctgtctgcagaggtctcactaaaaactagaacaacctccctgctaaaactcagggaggacaaacaaacaactcaacctgaaataaatacaaaggcattatgtgcttcttggtacgtcgagggtcctaattacccctcaaaaggaggtagcagggcctttccctggacttggccacctcacctgcagccttcttgtgagaggtcagaagtcagaagactggatgggcctccctaggcccagcttccattaggaaggtgaggaccaccccttatccactcctcacccgtaccattcatatctccccacacagcttctgccggctggggcaggaaaggcgaggagaccccatgccctgagggcagcacctagtgtccaatgtccctgtgcaggcagaggggctgtcagcctgtctgtgaggaggtagagtcgggggcaggctgctgggggcaggcagggccactcaattaatcaacaggtccccaaggtcgtaggagtcgaagagatcgctgatgccctcacccgcctccaagccccacaggtagtcgtcctggtccaaggatggggagaagctgatcagaggggagctgcacgccagggtcggggacaggaactggtcctcagtctgctgcaggagtgggtgcggcagctccagcaggctgtcagtagcctccaaggggaccagggatggaggcggtggggcctgctggggggttggcgctggtgctggcactggagacaaacagacaaaggttacgcctggccctagcatccaactcctcagcacgcgaggacagacttccggttctctggatgactgcacccttcttctctctccttagcctgggtggactgtcgtgctctcaaaatccaccttccagagtctacacccaaccctacaacttttcatgtattttttatttttttgagaccgggtctcactctatcacccaggctagagtgcagtgttgtgatcttggttcactgcaacctctgcctcccaggttcaagcgattctcccacctgagcctcccgagtagctggactacaggcatgcaccaccacacccagctaatttgtgtatttttagtagagatggggtttcaccatgttggccaggctggtctcgaactcctgacctcaagtgatcggccttccaaagtgttgggattacaggcctgagccactgtgcccggccaaaaaggaaagaaattctgacacatgctacaacatagatgaaccctgaggacattaaactatgtgaaataagccaatcacaaaaaaacaaatactgtgtgattccacttacattagatacttagtcaaaatcgcagggacagagagtagaagggtggttgtcaggggctgggcagagaggggaatggggaataggtacagagtttcagttttacaaggtgaaaggagttatggagatgaatggtgatggttacacaacattatgaatgtattaattaccactgaactgtacatttaaaaatagttatgatggtaaatttttgttatgttgcctctactctccaccacacacaactatacctgacctcatcaccctctccaattactggcccatttttctgctcctttgcacagtaaactttctccagagtagcctcagcttgtctccacttccctattactattctctcttcaactcactccagtctggggtctctccccaccatgtccctgagccagtgacatccatgctgctaaacccaatggtcatttctctggcttcatcttatttgacctttcagtagccattctccagcactctatgctcatttctttctcgccgccttctttttttttttttgaaacagggtcttgcccaagctagagtacagagtgcagtagggtgaacacggctcactgcagcctcaaccttctgggctcaagcaatcctctcgcctcagcctcctgagtagctgggaccactggtgcgtgccaccatgcccatccaatttttaaacttttttgtagagacagggtctcactctgttgcccaggctggtctcgaactcccaggctcgagcaatcctcctgcctcagcctcccaaagtgctgggattacagacatgagccaccacacccaacctgctcatttccacttagatgttaagacggtgatttcccatacagggacatgcaatgaagcactggaaattgcctgccacatatatcctgatgctcagaatcccccacattgcagtcactccttaagccccagccaagtattattctgaagatacaactgcgctgggatgctaggctgcctgttgagactggtggtgcacccataggcatgtgatttcacattttatttatttatttaatttattttgagatggagtcttgctctggacttcacgttttagagcatccattttctcccctctgcatggggcagcatagcactacctacctcaaagggttgctcagaggaccgcatggtaagtgcatatgaagcactggtttggcctggtgcggtggctcatgcctataataccagcactttgggagggcgaggcaggcagatcacctgaggtcaggagttcgagaccagcctggccaacatggtgaaacaccgtctctactaaaaatacagaaattcgctgggtatggtggcaggcatctgtaatcccagttaatagggaggctgaggaaggagaatcattggaacccaggaggtggaggttgtagtgaggcaagatcacgccactgcactccagcctgggcaacaagagcgagactcgtgtctcaaaataaaaataaataaataaacaaacaaataaataaataagcactggtttgtcgggtctgcatgctgcccttgctcctgttaaaaattgctcccatttaccaaggctaatgggggaggtggtggcactgcccttgaggcgaggcgtggttcagcctccttgcacactcaaatggccctgagggagtccatgctgttacccctatttacagatgagaaaactagggcccaaagaagtccattaaatgtatattaattaaaaaaaaaaatctaaggtttgtttggcacgctgctgatgttacagtcagaggcctggcttgggagcggggagcatgtgggctcagactctagcgcctcctctcaccagccatggaaccccagaactctgtttcctcatgtggaaaaacagggatgagtattagaagcagtaactgataaaacacatgtgaaaatctctattataggtcagaccttgctgtctcctgctgttgatcacgtccagaaatagaatcgccttttgtaatatgtgtctctccaccacactctgaatggctcttactgcttttctgtctctaaaacagcaccaggcccagctcagtagatgctcttcacacaagcttttttttttttttgagacagagtcccactctgtcggtcaggctggagtgcagtggtgtaatctcagctcactgcaacgtctgctttcctggttcaagtgactattgtgcctcagcctcctgagtaactgggattataggcatgcaccaccacctccggctaatttttgtatttgtagtagagacggggtttcatcgtgttggccaggctggtctggaacttctggcctcaagtgatccacctccctcggcctctccaagtgctggattacaggtgtgtgccaccgcggctggccacataagttttttttttttttttttaaatcacatttatgccatgtcatcttctataacccattcaatattcatgaggaaatttcaagtgtccccatttgagagatgtgggaactggggctttggggggttaaagtgattcactcacagtcaccaagtcactaagaagtgagatacaggcttgaacacaggtctcccaatttcaaatcctgtgccatcagctacatttaggtgtatctcagaatgtcagagcctggagaaatgtcagagatgatgttgttgaaaccccttccattacagatgagggaaactgaggctgcagagaacacttcccctggtaatgcagaaccagggccaggacccaggtcccaagactgtagtggcttcctctcttacatggcttctggcactcagacctcaaaatgatactatttcagaacacagcacggaacatgtgtgtgtgtgtgtgtgtgtgtgtgtgtgtgtgtgtgtgtgtgtgtgtctgtgcaggagaatcccttgaacctgggaggcggaggttgcagtgagccaagaccaggaaaacttcctcctcctcccttcagcagggataatactatgaggccatgtgacaagggtcgtggggacagccatgacatgagagctggccccaccagactgctgtgtaagcctctgctcctctctgggcttcaggatcttgatttgtaaaactcaggtaaaaacttcacacccggctgggctcggtggctcacacctgtaatcccagcactttgggaagctgaggtgggtggatcacctgagatcaggagttcgagaccagcctggccaacatggtgaaaccctgtctctactgaaaatacaaaaattagccgggcatggtggcatgtacctgtactcctagctactcgggaggctgaggcaggagaattgcttgaacttgggaggcggaggttgcagtgagccaagattgtgccactgcactccagcctgggtgatagagtgagactctgtcttaaaaaaaaaaaaacaacttcacacccttgtttatgctttgggatctgccacctccacccaaggtctcagaggacaactgaagcgaaggtggttccagcttcggagggctatgcgcatgctgacacttgagtgaggaggcacagcaggaggaggatggaccagagggtggggcagaggtctgggatgggagataggcactggggaggtgtcccaagggacagatggctagcacagggagaagctctggtccctgatgaggcctgacagacacaggagagatcattagagaagagttgggaggctgggctctggtcccagctctgccatcaacttgctgtgtgaccttagggaagccacttgccctctctgggcctgtgttcattcatgtgttaaaagaagggttgagttagttggggacagcaaacttctataaagagctggagcctgtaatcccagcactttgggaagccaaggcaggtggatcacctgaggtcaagggttcaagaccaggctggccaacatggggaaaccctgtctctactaaaaatacaaaaaaaaaaaaaattagctgggtgtgatggcgggcacctgtaatcccagctacttgggaggctgaggcaggagaattgattgaacccaggaggcagaggttgctgtgagccaagatcataccattgcactccagcctggtgacggagcgagactgtctcaaaaaaaaaaaaaaaaaaaaaagctggagagtattttaggctttgtgggacacttgtggtctctgtcacatagttgccttctttttctttctcccacaactctttaaaaatgtaaaaccattcttagctcatgggtcattaaaagcaggtcagatttgacctgcaggcaatagtttattaacctctgagttagagaaatggacacaaccagtgtactgcagagcccttccagcaagcctcttccatcagcccagctctacctctaccttggtctaaacgctagggttctacttaagagaattctgctgctaagaagacaaaaagtggaacactggcctacatagccttgaagaatcctgccagtctagccggatgtgtgatccaggaaaaggcaaaaactgttctggagaggggcctttacaggcttccatttgtactccttctggactcccaccctccttgggaagctctcaggaactttgctccctggcaacttacctgtactaccttccatcaggggtagccagctcttaaccataccgtccacctcccagccagaagccccttcttcgatttgatctatgccttgtggagagagcactgggctgggagtatgtagaccaaggttcaagacacagctctgttgcctcccagctgggagaccttaggtaagacacatcacctctatgtcttattttttttttaatgggcaaattttattattttatttttattagagatggagtctcattatgttgcccaggctggtcttgaactcctgggctcaagtgatcctcccacctcagcttcccagagtgctgggattataggtggggaccacagcgcctggcctattttttaaaattttattcttatttttatttttgagacagggtctccctctgttgcccacgctggagtgcagtggcatgatcagagctcactgtagcctcaacctccatggctcaagtgttcctcccacctcagcttcccgagtagctggactacaggcgtgtgccaccacactcggctaatttgtaaatttttttatagagacagggtatccctatgttgcccgggctgctcttgaactcctggtctcaaatgattctcctgcctcagtctcccaaactgctgggattataggcgtgagctatataatctcacaacaacctatgagttagacagtattaattactgcgcccaactcacagatgagaaaaattgaggccaagagaggttaagtaacttgtctaaggtcacatagctggtaagtggatgggctgggattcaaatccaggccttcctctgccctggagcagcaccagccttcctagtgaggctttataaagcattaagtacaatgcacatgtgtggggtaggatgactacatccccagctgctggataaaacaggaggttttcaacaaacattgatatagaagagaaaactaaggccggtctctccccccacctcctgtccctctggacaagggacctacctgaggatgctgtgggctccatgatgctagggtcggtgctgctgctgggctgggcagagtcagggctggggcagagggtggaggtagaggggagaggctcctcggaaggactgtccggctcctgcacctcctctgggcacaggtagacttcgatgggcccttgggtgctcttgagatatatctgcaggttgtcctggaggaggaagagaagccaggtcattgctctgggcagctggacacttacacttagtgtgtatggacagacgcacgtggctgctgccatccatgggtgcaagctcaaaccctgggctggcactgagaccaactccatctggcctaactaaggtggacttccgctgtttctgctgtctggccctgaagcccacttcttttagggggaacaccttgattttcctgtgggaaatcactcttccccccactctcaggtcatctagttttggggcgggggggggggggcagcacccttccccaatgccagtgggtgagcttgtgacgcagccaggaaagttagtgtgacatgattggttcaggatggcccatggctcaggtggatccaaccagcactaggcccaggacttttgctggacttgtgggaaatggaagcccccttcccactggggttgctgagctggtatcataaaagctacctctaccaccacaaggagagagcccacctgggaatggagtcagcacagagaaaagcagagagatgaaaagcgtgagacagacctgaagtcatagtttgagcatctacatccaaccttgccagcaatctctgaatctcccccaggacttgtcatttggttcccaccacccctacccatacctcccgctgaagccagttggacttggctttctgttacctgtaaccaagagtcctagtatttggtcttcccaccctgtcccttccctaccacataaccgcaacttaagccacaactgatgacatgcatgccatccaggcacatgtccaggtctccatgcctgtactcacacagaactgcacctagcaaaaaccctattcattctttaagacctagtttaactgtccccacctgggatacctcctctaactaccctttctctatgcttgcaaagcacatcttcagtctataaatgacagcgtctttttcccactaagtcgtgaactcctccaagggtgggggcaggaccttaattgtctctgcagccccagttcttcctttaaataaattatttcttgagtccttataatatgccaggctctgggcaagggatacaaggtgagtagaacattctcttgtgaagcttacaccctaatagatgaagcagaatgcaatcgtgtaatcatgccaaatatacctcagcaaatggagattaaattaaaggcagcggaaaagcacaggtgtttatgaagtctggaggtaatcagagaaggcttccttgaggaagtgacatttgagttgagacctgtaggatgaatagcggtaaatcaggcagagagggaagaacatttcagctcgaggggaagagcatgtatgagggtcttgcacggctaggtgcggtggttcacgcctataatcccagcactttgggaggccaaggcgggcaaatcacttctatgccgaagttcaagaccagcctggacaacgtggcaaaacctcgtctctacaaaaaaaacaaaaaatgtgctaggcatggtggcatgcacctgtggtcccagctactcaggagggtgaggtgggaggatggcttgaacccgggaggcagaggttgcagtgagctgagatcatgccactgcactccagcctgggtgacagagcaagacgctgtcttaaaaaaaatcaaataggttgagtgtggtggctcatgcctgtaatcccagcactttgggaggccgaggcaggtggatcatgaggtcaggagttcaagaccagcctgaccaacatggtgaaaccccatctctactaaaaaaaaaatacaaaacttagccgggagtagtggcgggcatctgtaatctcagctacttgggaggctgaggcaggagaatcgcttcaacccaggaggcggagattgcagtcagccaagattgtgtcactgcactccagcctgggcaacagagtgagactctgtctcaaaaataaataaataaataaataaataaatcaaacaaaacagaagatctcatactaggaatgagcttagtgcaatggggaaactgcagacaggtcagtgtggccaaaacaaagacagatggggcagcggggaaaaggaggttggcaacgtcagctggggtctcagagcaccgaagcctcatagggagtgtcaggaattttggtctttaacctgggaaagcacggtcagcatgaaaggattttcatgagtattgacaccgtcatacgtgggcatgagtgtgcatgtgcgcaggaacccagggctggtgggatgcagaaagaaaccaggaacagagattttctcaggccactactcagtctccgttgccctttccagcttctgccatttctgcccaagcttgaaggccaccaatattgccatggacaccacaatgggcctgcaaagcatggggctaggcagtgccagggacagagtctgcagagccgcctggaacgctccctggcagggtctcaaccctgctctccaccaaatatttcccctctcacctcagtcctgtcgggcacttccagtctcgtctgcggaggggccttgacggcaatcactgtctgctccttaaagttgccaacagcacggatatcctggtaagtcacataggccagcgtagggcaggagagtcaagaaaagtgactgtctggtcaaaattcaaaccccaaacctgccagggagcaccttcacccacctctcctaagcctctgaacattactttctcactccttgtacaacttagaaataatacaatctgtaacctgttaatctcataagctaccttagatccctttggaaagcaaatgggaatataaatcataaaaaatgttgccttacattataaatcataaaaaatgttgccttatgtaaaggcttcatctctcaaactagatcattagctctgagaaggcaggaagatgtgttttatttctttatatttctcacaatgcctagcatccttccaaaaatacaaggtcagatccaaaaccaattagatatgaaatgattttggaaaatgtatgaaagagccttagcaaagtccatgctctttgacctcatcatttcaatcctagggatctgacctaggaaacaagtaaaaatatgggaaagcattctatgtataaagatattcggccgaacgcggcggctcatgcctgtaatcctagcactttgggaggctgaggcgggtggataacttgaggtcaggaattcaagaccagcctggccaacatggtgaaactccatctccactaaaaatacaaaaatcagctgggtgtgaaggccgggtgcggtatctcactcctgtaaccctagcacttacgaaggctgaggtgggtggatcacctgaggtcaggagttcgagaccagcctgaccaacatggtgaaaccccgtctctacataaaatacaaaaattagccgggtgtggtggcaggcgcctgtaatctcagctacttggaaggctgaggcaggagaatcgcttgaacccagggggcagaggttgcagtgagccaagatcatggcactgcactccagcctgggcagcaatagtaagactccatctcaaaaaaaaaaaaaaaaaattagccaggcatggtggcgggcacctgtaatcccagctacttaggaggctgaggcaggagagtcactagaacccaggaggtggaggttgcagcgagccgagattgtgccactgcactccatcctgggcaagagtgagactctgtctcaaaaaaaaaaaaaaaaaaaaaaaaaaaaaaaaaagctatgttcagcaggcacacaactacattacaactatattgaaataaaacacattctgtgtgcagttcaagaacaatggctatgttaaggtggcagctcatcattctttttctccgttttccagatttaaagaaatttacttggcttattttcaataatgaaaaaatacctttaataaacttgaggccaggcacagtgactcatgcctgtaatctcagcactttgggagactgaggcaggaggatcgactgaagccaagagttagagaccagcctgggcaacaaagcgagaccctgtctatacaaaaaataaagaattagccaggcatggtggcacatgactgtagttccagctattcaggaggctgcggtgggaggatcacttgaacccaggagggcgaggctatagcgagctatgatcatgccattgtactacagcctggatgacggaatgagtccttgtctctaaaaaaaataaataaataattttaaaaatagacttgagaagaaaagccacccaggaaggaagaaacagatgccagacccttagggtaagttactgaatcaactcaggatagatataaacatgcaacaggttcctgctccctgacaccttcccccaaccaaggaggatatctcttgttggccttgtcctcagtcaggtgcttgaagctcagagagcagctctggatgagctggtccaaggcctgctccgtgttcatcagctccttcagctcctgccccagctgttgctgcttcccaggtctggtggggtcttcaaacattcccctgcctctgggaacagagcagccccccagtgtcagtctgtgggtgaaactccagaacaaggtcattcaaaaaatagtctatgagggtgcttccctgggttgtggaaatcagtggtcatgcctgtctctcagggagctaccagggattggaaccagaggtttgggggttgggcttgggagaaaaaacaagtcaagacctgaaccccatttctgaggggctctcgactctgttcatccctatgccccagcctcctccaactggagtagcctcagtcctgactccctcccctgcctggtttctcttaggatttatgccaagggctataggtcagctctttaaaccctgtagaaatggagagaggaggctggagtactcctatctcagatctggaaggagtccgggatccccctacttagctcccaggggactgccctaagctagaagaagtggatattgggatctctgactcaagaggaagaatctgaggttccctttggcctttacacctcccagatgtcattctccactctgccccgcatcacgttctccgattacttcagcaggtacacggcgctcttcctcaccatacattggctctacccccagcaataagcctattggatgttgctcttggtccgcctcagcccttgtgcccattggatgttgctctcagccccgcccctgccactcacacccactggctattgcctctggctccgcccacagcacaagtacccattggagggtaccactggccgcccaggcactcacacccactggatgttgttcttggccttcttgcggatgagctggatgccttccagcacgttggtgatgtcatagatgcgccgcttctgcacgtccagcacctcagcggcccagttcaggtccaggaccccatcctctgactcgctcaggaggtaaatgaacttcttggtgagcagccccagcgaagtgtcataccgagtcttctccccgggggatttgggggctgaagaagaaagggacccagtcacagctcagggaggggagggcccgcccaggaccctcgtccattgacctaggctcattaagtaccacctttcaccacccactttccagtttacaaagcagtgtgagccagggcatccatcaccaccactgtccagacagggaacctgatacctaagagggaaggtgacttgcttaaggtctcacggccaatgggcagtgttggaagcctagtgtcctgactcctggttaaatgcacatttccaccacagcttagggctgccagaccaccacccacaactactgtcactgttctaagtgctttccatgtacgaacacatttaagccctacaacaccctgtaagggttgctgtacaatcatccccattttatagatgagaatactgaggcacagtttaagtaatttgctcagctcactcagctagaaagtggcaaagctggaattcaaatccaggcagtctgactccagagttttccttaaccattaccctatcctgccacttaaatgtccggagtttggaattagaatagggtagaaatgataagcctggatttaagagcatttttatagacacacacttgctttttcttcccatgtgaatcacaatgattatctgagaaaaatcggtcctgtaacatcaagtcggggaggttcatgagaaaggtccctttctcaatgaggttgatgttgcaagaccacatctcagctgcagcatcttaaaccacgaggggacttttgtaatcgagtgacttccaagtcatatagcaagttagtggccaatccagtaattctggaacctgaattttagagtcttaggttcctctggaggaggaccagttatcatgagcctcaggatccttcaagacagtgctctgggcagccttgaccaatcaaatgtagaggaaactttcttgccattcctgatctagctgtgtcttcttttacacaagacaactaaggttcacaacaactaaggttcacaggagtgacctgtcaggtcggagcagaatcctacctggacccccaaaactagtgttcctcccaaacacagttgctttaactcctgctctaaccaggatttttttttttttttggagatggagtctcactctctctcccaggctggagtggagtgcagtggtgcgatcttggctcactgcaacctgcctcccaggttcaagtgattctcctgccttggcctcctgagtagctgggattacaggcatgcgccaccacacccggctaatttttgtatttttagtatagacggggtttcaccacgttggccaggctggtctggaactcctgacctcaggttatctgcccaccttggcctcccaaagtgctgggattataggtgtgagccaccacgctcagcctatccaggatattgactgaaaatatcaagaggcagcaaccccctccaacttagctttaggaaggcaccacctgggcagcctctggatcttaaaaacctttggggtggcagagactggattaatctgtgcttcccttccctttgaatcacttattcagctccttgtctgcatgtgggagaaagaccctggttagcccctgctcttctgatttagaaaaatttaccttgacctaaacattaaaacgttttaaaaataataaattcccaaataaaacactggtcattgagtttagatcatgagagcagtacatggtatggtagaagtagtgcgagactggccaggcatggtggctcacgcctgtaatcccaccactttgggaggccgaggcgggtggatcatttgaggtcaggagtttaagaccagcctggccaacatggtgaaactgtgtctctactaaaaatacaaaaattaggcagggatggtggcatgtacctgtagtcccagctacctgggaggctgaggtgagagagttgcttgaaccccagaggtggaggttgcagggagccaagatggcaccactgcaatccacatttggtgacagagcgagacctgtctcacaacaacaacaacaacaacaacaacaacaacaaaaaaaaacacagaagtaatgcaagatttacatgtccaggctctagtcctgactccactctgagactatgggcaagtcactcaagctctctgagtctcaagttgcctgattagtaaagacagacaagcctacctacctggcaggatcaaataataaaatacgcaggaagcttttgtaaactggaaagtgatccaaatatgactaccagtgattgggcagggcactgccctctgcccctgccccaccccaccccagaggccccatcagcactgcttacttttggggctggggaggccatccactctgatgcacttccccttgggggttgggaactcagggacgacgggcctcccaatcccctccagatccagcttccttttggccttggagaaaagggggagagagaggcagagtttgagaatcattcctcctttagcctttccctgatgtggggccaaagcaatgaagccacttagcagccacctctgtgcctcagtttaccgccagtcctggtgaagcactgctgtacttgataggaaaacatcagtgacctgagaagtgagctttcaggggaaatcttgttttctgaagggcaaataaaactcccatcctctgaggcccaggcacttgagaccctaccaaagccagtctggccaagggctcagagctccttaaccacgggccctaagccggctcctatacctgctcctcaccccaccacacccagaggatgataccaggaggaagcagtgggtggggcctaaaccacatcagggtggggaaagggcccccctacagaagcagctggcccagctagactgagtgcccatcacagtcccacagctggtccttatcagggcggggctgggcatccgcccagacccaggggacttcctggctcagtgccacaacccagggaggtgcccacagtgggaagcagtgcaaacatccccacccccatgtttgggctccagcttgagggccccagggcctcctgaatagactgcatttgccattctttctttgccgagaggggcagacaatgaatccttcccgtgtcttaaggacaagcagctgaggccaccccccccctccagctccccctttctgttcccgccaagcttgggaaacacctgctggggaaatcaaaccacagacccatctgctcctctccaccctgttgccacccgggccccaattaggcccagagctgcactggcccggaaagggcctctctcctggttagggctgggcaggggcagggcaggggcagagctggggcactgggacactgggacataggtcagagacccatgcttgaatctccagctccttcgcaggctcacggtacaagttgggggaaatgttacacatctaaggagcctcagtttcttcctctgtaaatggggtaaaaatgcctacctcaaggggctattgtaaggattcaaggaaggcactacctgggcagcctctgcatcttaaaaaccctggaacaggctgaattaatccccgcgtggcttccctttgaagcacttatttagctccctgtctgcatgtgggagaaagaccctggttagctcctgctcctttaacttctgtaaagttctcagcctgtgtctcagcacacagtaggtgttcaggaaacacagagtcccttccctaaaatctaatctcgacctcttccttcatacatccttctgggggtcatcgagcccatttctttcctctttccaactctggatcccccagacacccctaccctggcttggacagagaggcctattttaacatttagtggtgaggtcatgctcagcagggctgagacttctaactgctgctgagcacagctgggctgacaggtgttggaggtggtgacagctcttcctgctgtcagttccccttcccccactcctgccccctccaggaagtcttcctgggctgatgtgaggagccctgctccttggtttgaggagcctggatataacactcttgctttccaccactaccgagacctggaaaccatccaaacactttactgctcattcttgaatgagtctcttgaatattccttttctaccttcctaactggtgaaatcctatattctagagatttagccccatgctgtcactagagaaagggccagtcactggctgagaccttccacatgccctgaaccacgccccaacattcatcacttcactgaatcttcccataccactaatccccattgtacagctgaagtaattgaggcttggggagctccgaggcctccatcaatcctgaccaaggctgcacatcctagtattcttcatatatcccccagcaggagcaccaagggcagggagaggaagggaagctcaggtggagttctacctgaggcagaggtggggcagcccagagcctccccagccacacctgtctcccccgccagaacaaaccagaaagaatcccaggaagaccttgaacagaatatctatgctgagcctgttacatgctcgtaacagtcctaccacatcagtattggcactggctctcggaagccaaaaaatggagacttacagagagtaagcacatgcccaaggtcacacaaaggccggagccagggtttgaacccaggcctgtctgactgcaaagccatgtaccaggctgcctcagctgcatcccacacacgctgccccaggatttgctagaatttgggccaaggcctgggctacgcccacctgcccccatcactgcatgtacttgcacacacacacacacacacacacacacacagccttctctcttttctcactctccttcacccttattctgcactcccagggtcccaatgcggcaagtgtccccctaaggatacctccctgacacctttggacagtgcccagaggaaagtcagcctatggcttgggctgaacctgcagaacacaggtggcagaggacaagcccaggaggatcagcatcaaggtgaggctgagcacaggtcttggagtcagactggcctggctttgcatctaggccttccccttcttagctgggaaatcagttgacgtcaagtcacctataaaatgggcatcattgtctccacctatgctgaggattcagtgagatagtgcagcaaagcgctttgcccatagggagtgcccccaccagggagctgctagcactgatgtatggggagcaccagtgggaaaaggggaaagttcaagggtgagctgaaaagagactgcgatgaggggaggagagcaaaggctatggccacagccagaggccagcttagccctatcctggacgctcttaggcagcccctttggctggatcttcaaggcctggtcaggacgcaagcccaccctgccaacccctatggagaagagtacagctccttcctcaggcagctgcagaagtgcagagggtcagagatcaccaggcacaacccccttacgggcaccacggtgaggaaactgggacttggggaagaggaattgacttgcccaaggtcacgcagagtggagcctggtctctcctaagccctaagtcagatggtgggggtaggagcaaatgtaaggggtcgaaccttgctttcagatcccagctctgccacttcgtagctgaacagcctgggattcactgtcttgcctctctgagcctacacctcctcacctgacctgccttgtagagttgtgtgttaaaatgtttattttctttcatgcctcacaagaggaaatctggaaaatgtagacaaattgaaagaaaaggaggaccgggcgtggtggctcacgcttgtaatcccagcactttgggaggccaaggcgggtggatcacctgaggtcaggagttcgaagctagcctggccaacatggtgaaaccccatctctactaaaaatacaaaaagtaatcccagctacttgggaggctgagacaggagaatcatttgaacctgggaggtggagtttgcagtgagcagagatggcgctattgcaagccagcctgggcagagcttcctgcaggcgtgaaagagaatgatgccatgcgcctggccagaggaggcatgcgataaaggggcattccctgagccttcctcagaggacttggaaagagctctggacagggagccaggagatctgggttgtggccttcattctgccattgaacttggttgccatccttggacagtgcctgaggtccctttaaacagaagctccacaacaaatcctgctcaccctgcactttgcagcccggccacaaagcaagcggccacacccagggttgggtttggaactgttccaggtcacgcccttgtaaaatgagtaagcagagggcaggcctgcccacggggctgggccccgggcatctggggattgacaggagcgggagctctgggcctggcagggctttagggtggtctgctgcaaggagactcccctgcttcttcacttgtgacccaggcaagtgacttcctttctttgctcagtttccttatctgcaaggtgcctcattctggacatcctgaccaagataatgaacgtgaagagtgccaagcagtgtctggcacacgagaggcactcagtaaaagagagaccttcttgctaagatcactgagcccttctgggagggaggtacagacagatgtacttgggctcctctgggagggttcaaagcagtgtaaaaccacagctgttactgaaacttccagtctgaaagcagctggccagaggagagtgggcctgccgcaaagctcccttccctggggggagctcagctcctaagttaggcagtattaaaaaaagtcaaggctacatagagaagagcctgctgcctgaccaggtgcattagagtagctagctcatgcctgtaatcccagcactttgggaggctgaggcaagaggattgcttgagcccaggagtttgagaccagcctggggaacatagggagacccctgtctctacaaaaaataaaaaataaaagacagaagagctgactgccttgtgagtcccatcactctaccccatccccatctctgaccttaggtcacatcccctctctgagcctcagtttccccctgtaacatggagctattaatgccatctatttcacgaactacaaagatgttttaggctataaaacactgaacacaagatacccaatcccagttatcctcggttgcttaacctgtaaaatggggataataccattcctgcccactgccctcctagttagaaatcatgtgcaggaagggtctccaggaaggttaacgttttgaacatgggcaaagcctgagtccactggcagggagtggtggctctgcctgcatccagagctggctgggcatccgtgcttgctgactagcacaggtctgaccagatgcctctggggcagtggggggtggtcttatccctgtacccgaacttattcaccaaactcacaactaagcaaacctacaacacccccttcctctccctggagcctgcttccaaaacccaggacctggagctgaatgtggctgagaagagctagccccacagccaccctgtgcacacacgcattgtgaaggagagaacactgaagcccagactgggtccaagacttgtccaaggacacacagagaattagtggcagagtcacaccagaaaccaggctcctcaaccaccaccacctccactcccccaggcttttcccactccaccccccaccctaaagttgttttgattcacacgggctccaggaattccactcccacaaaacacaccctgagcccaggtcagcaggcagcctggtgccactacactttgggccctctctggcaacgagcctgggagcttgaggagagagcagccaatctgaacagaacccaagggggctgcccacatttgtatctgctacatggctgtctgggagggaagactgggcctgggggaggacctagggcagatacttggggctatctcaggagctggctggacaatttggagtctgtccatggcagattggatgtgagagacccactagacctatccctctgtcttaccaaagtcccacagtgtccccaggccatactctttgcctggacaatagcaggcacccagtactggtttctggccaaacaatgaagtaatgaatgaatggcggcaacgctggctgcatggacttccccaaggtcacacagtgcactgggagtagtgagttgggtctccctccagactcgcaatccagtgctcattccactccactagaatggatgagattatttcatccaaagtctgaaaatgaaggggtcttctactcagatattgggggcactgggtcctggaaactgaaagctcatcttccctcttcccaaaactctacctgctccactcaaactggatctcaggcacccctccctcctttcccacacctggaaaagcatagggggaagcggtgggggcccccagcattaccggcagccggcctgccggcaggcatcgcacaacttggccctcgggtccgtggggagtggcgtcgaggcaggtgcctggcgccgctgcgggaggcgccgtctgcgggtacagcggtgtgtagtaggtagcagtagctgggcagagctgggggctgctgaggccggatggccacagctctgtggggctcatcgcgggcaccaccttcggggtctgcccagcggccgaagccaaggcccggggcccttgcagcatagcgagtaaggcgccccctacccaaaagggcttggcgcgcccgcggacacctgcgggttccggtgctgccgcctttcacacggcccgcggcatggcgcggaggccgggggaagccgccaatggacgcctgcggggcaaggccggaccctcccctcctggcccgcggccgagcagagagcagcgcttagagatcgccgcttggagatcgcccggcggctgcggtggtggcactgccaggggctgtctcgtcccgagggcaccgcgacccgggacgccccgcgctccccaaggcctcggcacctggggtccggccggctctggggaggggtccccggcgtgccctcaagctcggcggagacgcgatgcgctgggatggggaggggggtctcgactgcaccgacttccttgcggctcgctctctagtccttgagtctttctctgcctcttttttttcttcttttttttttttttttagcgccaaacgtcgtgccgcgaaattcggatctcccgcggaaaatgccgcgctccggttggctgctgcgacagtacaggctccacccccccccccccccccggaaagaacgcgtcctcgaggcggcgattgcaacactagcttcgctgcttaaaggggcagccacacctgctgttggtgccgccagccgccggccgcgctagttagcagccggcgagacggagacagagggtggttccgggattcacagtgcagaggcggccagagcagtgcacagcgccccgagaaatgggcccggattccctgggattgaagggaaacattttggcgcggggtcccagcctgagcccagacccagcagtgtattccccaggccacaggcccttttgttagtttgcattgttgcttagctagcacatgtgcattcatatcccctttcctgctaaaatgaaggccaggaacctgttccctttaatggcagaggggtgagggacggaggcaaactagtctacttctttgtagggaaaactaacatctattcagcgcctacaggatgccaggcaccatgctagatccttacaagcgttgttttagttaatttattccaacaatcctgggaagaggaatgatgatccccatgataaagactgacagtctgaaaggctgggtaacttgcccaaggtcatacagagagattccctgatttgagagctggcaacagaatctgggacaggtcccagctctggagcccttgtttttccagttaaggggttcttctactctcccaagctgcctgggggcacagcagggtcagagtcccactgcagagctttgtcttgttcacagttgtattattaggacccaatactcagtaaatgtttgaacatctctaggtttcttttaaacaatccttttgtcacaagagcctctctgcctcattcaaaaaccttcattgctgataatacattcctcatcactccggtttagagaggctcagagaagcaaacttgggtagtgagtggtaaaaagttgctagaagctgctgctagatttcaggtctgatttcttgcctggtgctgtgtgatttttatgcaagtctgagccttggcattcaaagccctccagagacagtccacagcttaattcctcattagatggttgaggccaaggtggcaataacccatgatgattaagagcccaggctttgtagccaacagccccgaattcaaacccaggcccagacactttattattcattgtgtgaccaaggcaaattttgtaaattctctgatccttgatccttgattttctcctcctaatagcacttacctcatatgatcatgaggaaatctcatgagataatgcatataaagctttcatcacagaacctggatcataaggagcctcaagaattggcagctgttgttatatctctgactttttttttttagacagagtctcactctgtcaccaggttggagtgcagcggtgcaattctcctgcctcaggttcaagtgagtctcctgcctcagcctcccgagtagctgggattacaggcgccagccaccatgcctggctaatttttgtattttcagtagaggcagggtttcaccatgttggccacgctggtctcggactcctgacctcaggcaatccgccctacttggcctcccaaagtgctgggattacaggtgtgagtcaccgctcccggtcacatctctgaccttatctccagtgcataagacccttttactctagtctacgtatctcattggtcctttttggtcctttgagggccagcttaaatctcacctcctccaagaagcctcccctgcctgcttcctctcagccagaatggctcttaccctcttgggacccttagtgtgttctacctcaacaaaacaaggcttcgttttcataccttgtttatcagttaggttctatgctccttcaagaatctaggtcagatctctctagaatgccccttagcatctagggcctggcttggagtgcagaaggcaggtaataaatactgattatgattcactcatctgcctggctgcaaagaataggagaagttaatgagatctgaagtcagaaagtcaggaggcccagattaagtaagtcccgctctctacttcctagttaagtgacactggacagccgctgcttcacttctcttaaccacaatttcctcaaccatcaaatgtggataatgctatcactcagtcaatttcacattacttcagagacactacttaaatgacagtggtggcgatgatcactgatttttattgagaacctactatacactgggctctaagcaccttgagcccctcctctgatcctcacaacactgctctgagacggacactattattatccccattttacagatgagggaacctggaaggaattgtggcagagcaggtttggggaagcagcagggccccagggccagggagggaaatgggggtggcagggtggagctgggagaaaagaagggagccagtgaggggctgagagccagctctctgtggttgagtttcgggcagctggggctggctttagagtttcactgcctgggaactgactaattcttgcaataggtgtggggcacagatctgaaatctgcctccctgagcttgaattcctgccccattcattcctagcattgtgatcatggtcaggttgctggaccattctgagtctcaatttcctcatctttgaaatggaggcggcacaagtgacctctccatttactgtgaggccttagtaaggtgttggttataaagtccttagagaaatgtcaggtgcatggtaggtacttaatatattttggctaaggtttatgtgaaatggacccgaagaggccctcacatggaaccagactaaatacttgcagtttcaggccgggcacattggttcatgcctgtgaacccagcactttgggaggccaaggtggacagatctgttgagcccaggagtttgagaccagcctgggcaacatggcaaaactctgtctctccaaaatacagaaaaattagctgggcgtggtggcacacgcctgtaatcccagctgctcgggaggctgaggtgggaggatcacctgagcccagggaggtcaaggctgcagtgagccatgatcatgtcactgcactccagcctgggtgacacagtaagactgtctcaaaataaacaaacaggccgggcacggtggctcatgcctgtaatcccagcactttgggaggccgaggtgggtggatcacttgagaccaggagcttgagatcagcatggtcaacatggcaaaaacctgtctctactaaaaatacaaaaaaaaaaaaaattagccaggcgtggtggtgtgtgcttgtaatcccagctactcgggaggctgaggcaggagaatcgcttgaacccaggaggtggaggttgcaatgagccaagatcgtgccactgcactccagcctgggtcacagagcgagaccctgtctcaaacacacacacacacatacacacacacacacacacacacacacacacacaaaaccctcagagtttctgccgtacacgccctacactttcccatctcccaggctttgcttacctggctccatatcctcctattcttcaggccccgcctcccctccaggcccctcctcccctccatccccatgtgcccaaatctgactcatccttcaaggtccaactcaaatggagtggaaggagcaaagaatctgaagtcagacatcccagggttcaaacccaggccctgacactttattagctgtgtgacccaggcaaaatttcctaaattctctgatctttgatccttgattttctaatcctaatagcacttacctcataggattgtgaagaaatctcatagataatgcatataaagctttcagcatggaacctggtttataaggagcctcaagaattggcagttttcttacgtctctgatcctatctccagtgcataagacccttttactttaatctacctatcaacaaatcttcagactccttgggggcaggacccaggctttgttttcacttttgcgccttcctcccctgagatgccaggcacaaagtaggcctgaaataaatgataatagttcacatttcctgagaacttcctaggcgtaaacacccagctaggtattttacatacattattttgtcgaaacctcccaactaccctgtaacacaggtacattttggacagatgaagaaattgaagctgaaatatgtaaaggaacttgacaactgtttgaagatgaaatcaggatctgaactcagatctctcccaaggcactgcgctgttgtgaacagtgaactcagccccaaaaccccatgtgaaggagggtacattctgctaatgaaccaggggttccagtgctgcacacattgctggaagtggaaagactgtgtcccacaactggatgagttggggatgcttagtactattttccagatgaggaagccatgacttgcctgaggccacagagcaggtaagtgaggaagttcctgttccaggcaaccccagatagtcctggaaaaatccccaaactaaagcaaacttccattccagctggtgtatcttctcctgaaaaattccacagattccctgtgctcaaagtcctgttaatcagaatacaaactgcttgacagacacttcctgaaggtacatattccctgtcccgggctcctcagcacatcacctgttcacacgaatcccaaatcacagagaaaccagatcagagctatgggaaacaagggagaaaaatccctgctccatcttctttgtgcttttcctattctacaataaacatgtattactttggtgattggagaaaaaaaagttgttttttaaaaagagaaacaaggtattgctttaaggaagttctgctagtggtaacctttttactggaacattgttggaagatgggttcgtgggcttttctaacagtgactggcatgtagtaaacactatatgaatgtttgttaaatacataaaattctaggtgcaggccgggcgcggtggctcacgcctgtaatctcagcactttgggaggctgaggcgggcggatcatgaggtcaggagattgagaccatcctggctaacacggtgaaaccccgtctctactaaaaatacaaaaaattagccgggcgagatggcaggcgcctgtagtcccagctactcgggaggctgaggcaggagaatggcgtgaacccaggggcggagcctgcagtgagccgagatctcgacactgcactccagcctgggcgacagtgactctgtctcaaaaaaaaaaaaaaaaaaaaaatctaggtgcagtggttcgtgcctgtaatcccaacactttgggagcccgaggtgggtggatcagttgaggccaggagttcgacaccagcctggccaacatggaaaaaccctgtctctactgaaaatataaaaattagctaggtgtggtggtgcacacctgtaattccagctactcggaaggctaaggcaggagaatcgcttgaacccaggaagcggaggttgcagtgagccaagattgcaccactgcactccagcttgggagacagagtgagaacccgtctcaaaaaaataaaaataaagaaaaataaagaaaaaaacataaaattctaaatcttggcactccataagctatgtgctcttggacatatcattgcattactctgggcctctgttccttcatctgataaacagggctaatcacagctgtctcgggtttattgcgttgaagtgaatctgggatgggatgtgaatgtgctgtgtgtgtgtgtgtgtgtgtgtgtgtgtaccaaaatttattaagaaggcaaacaatttggttggacaactcttcaaagaaaatatacagaggccaggccggacgcagtggctcacacacttgtaatcccagcactttgggagcctgaggcaggtggatcacctgaggtcaggcgttcgagaccagcctggctaacatggtgaaaccctgactctactaaaaatacaaaaattagctgggcgtgatggcgggcgcctgtagtaccagctactcaggaggctgatgcaggagaatcgcttgaacccaggaggcaaaggttgcagtgggccgagattgtgctattgcactccagcctgggagacaagagccaaagtccgtctcaaaaaaaacaggaaatatacagaggccaataagcacgtgaaaagatgctcaacatcattagtcattagggaaatgcaaatcaaaactacaatgagatgacacttcactaacccactagaatggttataatagaaaagagagacaataactagtgtcgtccaggatgtggagaaccctcatacattggaaccctcattcattgctggtgggattgtaaatgggtataactgctttggaaaatagttcagcagtttttaaaaaagttatacagagttaaccacatgactcagcaattctactcccatatacccaagagaattgaaaacatatgttcacacaaaaatgtgtacacagatgttcatagcagcattatccataataaccagaaagtagaaacaacccaaatgcccattaactgatgattggataagcaaaatgtggagtccaggcacagtggcacatgcctgtaatcccagcactttgggagaccaaggcgggtgcatcaattgagcccagaagtttgagaccagcttgggtagcacagtgagaccccatctctacaaaaaaaatacaaaaatcagctgggtgtggtggcgtgcacctgtagttccagctacttgggaggctgaggtgggagaattgcttgaacctgggaggcagaagtcatgccactgcatcccagcctggatgacagagcaagaccctgcctcaaaaaaaaagtggtatatttatataatagaatattattcagccaaaaaaaggaaaaaaaaatttttttttttttgagatggagtctcgctctgtcatccaggctggagtgcagtggtgcgatctcggctcactgcaagctctgcctcctgggttcacaccattctcccgcctcagcctcccgagtagctgggactacaggtgcatgccaccacgcccggtgaatttttgtatttttagtagagacagggtttcaccgtgctggccaggctggcctcaaactcctgacctcaggtgatggtgatccaccacctcagcctcccaaagtgctgggattacaggtgtgagccaccgtgcccagccttttttttcttaatagtgacgggggtctcactatatcccgtggtctggtcttggactcctgggctcaagtaatcctcctgcctcggctcccaaagtgttgggattataggcatgagccaccacgcctggccccataaaaaggaatgaggtactgatacatgctatgacatggaagactcttcaagacattatgctaagtgaaagaaaccagacacaaaaggctatgtttgtatgatcccatttagtgaaatgtctagaatagataaatctttttttttttttttttttttttgagacagagtcttgctctgtcacccaggctggagtgcagtggcatgatcttggctcactgcaaccttcacctcccaggttcaagggattctcctgcctcagcctcccaagtagctgggactacagttgtgcactaccacgcctggctaatttttgtatttttagtagagatggggtttcaccctgttggccaggctggtcttgaactcttgacctcaggtgatccgcccacctcggcctcccaaagtactgggattacagactagaatagataaatctatagaaacaaaaagtagattagtggggctgggcgtggtggttcacgcctgtaatcccagccctttgggaggctgaggtgggcagatcacctaaggtcaggagtttgagactagcctggccaacatggtgaaactccgtccctactaaaaatacaaaaattagctgggcgtggtggcaggcacctgtaatcccagcactttgggaggctgaggcaggagaatcgcttgaaccgggaggtggaggttgcagtgagccaagatcgtgctactgcactccagcctgggcgagagtgagactttgcctcggaaaaaaaaaaggccaggcacagtggctcaatcccagcacctgtaatcccagcaccttggaaggctgaggtgggtggatcacttgaggtcaagagttcgagaccagcctggccaacatggtgaaaccatgtctctactaaaaatacaataattagccaggcatggtagcgcatgcctgtaatcccagctacttgggaggctgaggcaggagaattgtatgaacccgggaggtagaggctgcagtgagccgagatcacgccactgcactccagcctgggtgacagagcaagactctgtctcaggaaaaaaaaaaagtagattagtgattgctgggaatgggtcagtctctgtacagatgaagaacatgaggctcagagaagccaattgccacccatctgtgtgactttggaccagtgacttcacgtctctcagttgtgacgtggagagaatgacgtgcgcctgagatggtggctctgcagctcagtaaatgtgcctgcggcgcctggtgggtccccctgcgtcttcgttagttccttttccttctctcagacctttggctggaagctggtggggctgaaaggtgaaggctgccacctagaggtgaactctggcacctgccaaagcctgcgaggcgtcttatcttctcatcaaggtaactcacccgctatgggcttggggaggagaaacaggatgtgaaagaagcagccccgctgaggacagggctactagactggccagattctttccagatgtttgtaggccctgggaatgcttttcacagatgttgggtcccgtggaggtgatcccatgcgggaagagggacatccatgcgggagtcaggtcccagcagagctgcttagcgtctcttggggaaatgccacctataattccttcttcttctttttttttttttttttttgagatggagtctcgttctgtcgcccaggctggagtcccgtggcgcgatctcggctcactgcaagctccgcctcccgggttcacgccattctcctgcctcagcctcccgtgtagctgggactacaggcgcccgccaccacacccggctaatttcttttgcatttttagtagagacggggtttcaccatgttagccaggatggtctcgatctcctgacctcgtgatccgcccctataattcctgtaattgtcagtttattccctcgttttcctgagggatctctttaacacacacacctgaccttgtctctctctagttcaaggtctggcaactagctccccaccacggcccagccacccccaccaccaggtccctccgatcttcagacccttcacacatgggccttaggtttttttttttttttttttttttttttgagacaggctctcaccctctcaccctggctgaagtgcagtggcacagtctctgcttattgcaacctctgcctcccaggctcaagcgattctcctgcctcagcctcccaagtagctgggattacaggcacgcaccactactgcccagctaattttatattcttagtagagacgagtttttaccatgttggccaggctggtctcgaactcctgacctcaaatgatccacctgccttggcctctcaaagtgctaggattacaggtgtgagccactgcacccggcccccttacgttctaatccaacacactcttcctaactcccctctgacctctcagctctctctattgcccatgctgttctccctgcttcacatgtctctctccatctcttccaccagaaaaaactgttctgctctcagatagaagtttcttccttcttttctttcttaaaccagataaataaatcattgagaatgctgtgtacccccatatcccccacgtgatcttaaacagcactcaattttaaaagggtgcatttttaactcctcaggctaagagaacagaaacctgggacaaaattaggaatccagctcacatgcctgtaatcctagcactttgggaggccaaggcgggcggatcacgaggtcaggagatggagaccatcctggctaacatggtgaaaccccgtctctactaaaattacaaaaaattagctgggcgtggtagcgggcgcatgtagtcccaactactcaggaggctgaggcaggagaatggcgtgaacccgggaggcggagcttgcagtgagccgagatcgtgccactgcactccagcctgggcgacagagcgagactctgtctcaaaaaaaaaaaaaaaaaaatgaagccagctcaattgctaacattgaaaaatgactcagaactcttttttttttttgagatggagtctcactctgcagcccaggctggagtgcagtggcgcaatcccagctcgatgcaagctctgcctcccgggttcacgccattctcctgcctcagcctcccgagtagctgggactacaggtgcctgccaccacgcctggctaattttttttttttgtattttttagtagtgacggggtttcaccgtgttagccaggctggtctcgaactcctgacctcaaatgatccacccgcctcggcctcctgaagtgctgggattacaggcgtgagccaccgtgcccggccagaacttttttttttttttttttttgagacagggtctcgctctgtcccccaggctggaatgcagtggagtgatcttggctcactgcaacctccacctgctgggttcaagcaattctcgtgcttcagcctcccgagtagctgggactacaggcatccaccgccacgcccagctaatttttgtggttttttttttttctttctttttagtagaaacagggtttcaccatgttggccaggctggtcttgaactcctgaccttaagtgatccacctgcctcaacctcccaacatgctgagattacaggcgtgagccaccacacccagcccagatctcttttgaaataagcaagacattcagttttgaaatcgaggtggttttggtgttggccacagttggggtggtggtagattatgccagccatcttttggaagctgaccctgagccctgcaccccacctcttgttaggaatctcaatctatcattgtttttgtttgtatgtttgtttgaggcggagtcttgctctgtcacccaggcttgagttcagtggcgcgatctcagctcactgcaagctccgcctcccaggttcacgccattctcctgcctcagcctcccgagtagctggaactacaggtgcccgccaccatgcccagctaattttttgtatttttagtagagacggggtttcaccgtgttagccaggatggtctcgatctcctgactcgtgatctgcccgcctcagcctcccaaagtgctgggattacaggcgtgagacaccgcgcccggcccgtttgtttgtttttgtagagaaggggtttcaccatgttgcccagactggtcttgaactggaatcaagtgatctgccttggcctcccaaggcgctgggatcacaggggtgagcaaccacaccggccctctataatcgttttgcaattgtaattacagttgttttaatgttcttcctccccaccccacccccagatttaagcttctccttgtctttttaattttcacaccccaatatccagcatagtacccactgcagagtacaagcacaagaattgcttattgaactaaactcaacaaaaggtttgtttgtttgttttgagatggagtcttgctctgtcgcccactggaatgcagtggcccaatcttggctcactgcaacctccgcctcccacaggttcaagtgattctcctgctgcagcctcccgagtagctgggattacagtcacgcaccaccacacctggctaattttgtatttttagtagagatggggtttctccatgttggtcaggctggtctcaaactcccaatctcaggtgatctgcccacctcggcctcccaaagtgctgggattacaggcatgagccactgcgcctggctaatttgtatttttagtagagacagtttcaccacattggccaggctggtctccaactcctgacctcaggtgatccgcctgcctcggccttccaaagtgctgggattacaggcgtgagccatgcggcctggccaatgaaaggttttttggaataggtgcaagatcactcacaatccccttccaagagactttccaagaaagtctctggccactgtcagagtccctctgtaactctgcttggggggaaatggtgagttgggggccttatgaggccaaagaggtagtcacaggagccagaattctcacgtacctcctccaggctcatgaagagaggcacaactcacttttttcctcccactccctcccctccatctctccctattctctctctttcctttatttctctttttttagagataagagtcttgctatgttgcccaggctggtcttgaactcctatattcaagcaatcctcccacctcagcctcccaaaatgctgggattacaagagtgagccaccatacctagcctataattcactttctaacccacctccccgcccactgctctcccccacgccctgccctatacactgccccacccctgtgattattcctccccaaacaagcagatcaaaagtgatgctaagaagtcgggcacagtggctcactcctataatccctgcactttgagaggccaaggcgggaggatggcttgagtccaggagttcaaggccagtctaggctacctggcgagactctgtctttacaaaaatatttaaaaattagctgggcgtagtggtatatgcctgtagtcacagctcctcaagaggctgagactggaggatctcttgagcccaggaggtcatggctgcaatgagctgtgattgtgtcactgcattccagcctggatgacagagggaaaccctgtctaaaaaaaaaaaaaaaaaagctaatagttgcaaagcaagcacattcatgcccgatctgcttaattatcacaacagccctatgaggaagccaccattagccccacagaacagatgaaggaactgagcccaggagtagttcgatgattatgcctgaaggacagcttgtgtgtcagggccctgaattttatttactatgtgtgggtcacctttctgaaggctcataaacttccacgcatatgatcctcatatcatccccatgagatgtgtaatatcatcacccccattttatagatgaagaaactgagactctgagcatttacgtaacttacccaaggccacagggctggtgacagtagaggtggttttgagccagggctgtccaggtacaccctctcaaccactttgtcatccttcctctggatattctctggacaccttggctttagcatgtgcaagtaggacgacacccccctcaccaagaggtagtaaggattagatctaatatgtgtgtgtatctggatcacagtaaatacccaggaaaagaggtcatcatttttgttcctctctgacaattgcagcaactggccgccagaggggagtcatgcactgaagacctaagcccttcccaggtgactggttgaccattcaacggttaagaattgtgctgggcccttttatctctgtgcccaaatgtgggatcaaggacagatctcaccagtacggaactacaaggatcttttgactcttgcaaaagaaatacagcttaggccttaaaacccatctaaggcccctttaccaacaccaattctaggactgggagggtgggggagatccctgtggagggaggcccagctgtgtcccatttggtggtggcagtgctgggggagcagcaattatcagtaattcctctcctgctggaggctgggctcctggagccacagctgcaaggtgggaggtggcaaggaggattttggaattgtctccctaaggggtttccatggttacagatggatacaggcagcccactaggctgggtcctttctccatattgtctcctggggagacaatgggctttggggatggggcggcatgccacgcagatcatttctagagcagggaccatgagtgcctgctctgtgaacccctggaccccagctgctgggacagagggagttgggcacagggatcagccttggtaaccgactgcttgctttggggtacaacactactgctacagcaactcaagagaggctgtccgctgagccactcaagcaaatctgaggctccaaaacagccaaactgcagaggcctccaggtatttaaaaagcatgcattttggagtcagatagtcatgtcatgattctgtcccttgctagctgtgtgacttgggcaagttattttaccttcctgagtccccgtgtccttatcgcgaaagtgggacaacacccactttataaaattggtgtgaggaagcaataagcacaaagcctagtgccaagaaaatgctcagagagttcctaagctcaggtgggttgatggggtcctgggatgtgggactggctctgtacccactctgtggccttagacaaggcccttcttatttctgggtctcagctgctccatctatgacttggagactttgaaaggcttataaaggatgaaagctactcaggaggctgaggtgggaggatcccttgagtcctggatccaagacccgcttgggcaacatagtgagacccgccctgcctcgaaagaaaaggaagtacctggccaggcgcggtggctcatgtctgtaatcccagcactttgggagaccgaggtgggcagatcacgaggtcaagagtttgagactagcctggccaatgtggtgaaaccctaactaaaaatacaaaaaacattaccgggcatggccaggcgtggtggctcacacctgtaatcccagcaccttgggaggccaaggcaggcagatcacaaggtcaggagatcgagaccatcctggctaacacggtgaaatcccgtctgtactaaaaatacaaaaaaaaatagccaggcgtggtggcaggtgcctgtagtcccagctactcgggaggctgaggcaggagaatggtgtgaacccgggaggcagagcttgcagtgagttgagattccgccactacactccagcctaggcaacagagagagactccgtttaaaaaataaataaataaatttcctgggcgtggtggcgggtgcctatagtcccagctactccggatgctgaggcaggagaattgcttgaacctgggaggtagaggttggagtgagctgagatcacgccactgcagtctagcctggtgacagagcaagactctgtctcaaaaaaaaaaaaaaagaaaagaaaagtacttggccgagcacagtggctcatacctgtaatccaagcactgtaggaggctgaggcaggaggatcacaaggtcaggagctcaagaccagcctgggtaacacagcaagacctcccaatctctacacatttttttttttaaagtagctgggtatggtggtgtgcacctgcagtctcagacttaggaggctgaggtgggaggatctcttgagcccaggggtttgaagctacagtaagctatgactgcaccactgcactccagcctgggtgacagattgagaccctgtctcagaaagaaaagaggggagggaacgggaggtgaggggagaaaagaaaagtgcgagcttgggaaaacagaaatcaaaacactaacacaacaaccccatcttccaggacttaaatccagttggaatatgcaacatgtgatcacaggggcatgtggtatttgtgtaagtagactctgtgctgtggcaattaagggagatttttctgagggaggcaggacttaagttaggccttcgagagtctcagaatcaggaaaatattccagaaaaatctcccacgctatgccaaggagaaacagaatcccagaagggcgaagggactcagttctctgccactcagtttcaaatccttcctagtcactgccttttccccaaggaagggtgtgtgtacgtggggaggaaaggaaggagtaagcaaaaaccattgtcatttatgtccaatttatgggacacctttacatgagtcaagttaatcattagccccattttatagataagtaaactaaggattgctctaatttttatccaactgatttggcgaaacaacgtacatggcccaagaataaactttgtctccagtatggaatacaaaacttccccaagggaaatgtaaaacaattccttcatgtttaaatcatcagcagagaaaatcaaatcgtttacatgtctattacttgtccttctattaagaggcacttagcacagagcctcgaacatggtaagtgttaagtaaatgaaagttgttgtcactgtcactgctattattaaatgtattactacatattcaatgctggggatacagaggtcaataaaactctctccctgtagtcccagctactctggaggctgacatgagaggatcgactgagccctgttggtggaggttgcagtgagccgagatggtgtcactgcactacagcctggatgacagagagagaccctgtcttaaaaataatgataataataataaaaataactcccttctgtctttgagaaattcagcctagtgagagaaaacgggctgcaaaaaaaatgatctcttacttcctggacacacatataccatctcgttaaattctccaaacaaccttgtgaggaaggttttttctttctctcattttagaaataaggaaactgaggttcagtgggcttcattgacttgcccagacattgtaaaatatgaataaaatatgaaataaaatagtgttagaagacaaacacctttattggattaacagatacatcaaaaagcaataaagtctattaattacgtaaggcacatagaccatagcccattttatttattattattattattttttgagacaagagtctcactctgtcgcccaggctggagtgcagtggtgtgatcttggctcactgcaatctccgcctcctgggctcacgccattctcctgcttcagcttcctgagtagctgggactacaggcgcctgccaccacacccggctaatttttttgtattttttttagtagagatggggtttcaccatgttatccaggatggtctcgatctcctgacctcgtgatccacccacctcagcctcccaaagtgctgggattacaggcgtgagccaccacgcccggccagccccattttattaaagactatgaaagatagcttttactgagctaaaaaatgagccagacttttgagagctctcatttatggagcaacaacgaagtgccaggcactttccatgtgtctgtcaaatcctcataaccctgagaggtaggaacagttagctccctttcacaaatgacaaagctggggctcagagaggtgaagttacatggccagggttgcacagcaaaagagggcatcgagccagtgctgggacccaggctctgacacttgggctaggagctggagccaggcctttctcccaagtcaggtttactaagagctatgctgctgctgtgagccaatcaccctttcctgcctcactccacggagcgcgatgagtgggcgggagaggggacaggcggttcttcagggcaagaggacttgtttcagcccatttgggaagcagcccggcgtagcatggccttctcaaagtgtgtgtgtctgcatgcatgtgtgctcatgcatgcacacatgtgactgtgtgtgatgttggctggctgtcgggtctcacaaagccatgtgataaaaatctggtacatctttctgaaatgtccgttttactcaaaaaatacaaataaaagaaagagagacatcacaattttatattaaaacacagagggctatagaatgtaagagaacacaaccttcacatggtatgttaagataatgaatgacaactagcatttgggggctgtggttattattatgtgccaggcactaatctaagaattttgtatggtaactaagcctcacaacaaccatctgtgtagggactgttagcagacacggagaagagaagttaagtcacttgtccaagttcacacagctagtatgtggaagagcctgggaacacaaagcatttcattagacaaatcttagaacatctctattatccattgtttgttcaattaaaagtttgtaacaagggtcaggcgcagtggctcatactcctgtaatcccagcactttgggagaccaaggtgggtggatcacttgaggtcaggagttcaagaccagcctggacaacatggagaaaccctgtctctattaaaaatacaaaaccccatctctactaaaaatacaaatcatggtgatgggtgcctgtaatcccagctacttgggaggctgaggcaggagaattgcttgaacctcagaggtggaggttgcagtgagccgagatcgcgccactgcacttcagcctggacgacagagcaagacaccacctcaaaaaaaaaaaaagtttacaaggacgggtgaggtggctcatacctgtaatcctagcactttgggaggccaaggcaagtggattgcttcagcccaggagttagagaccagcctgggcaatatggcaaaaccttgtctccattaaaaatataaaaattagccaggtgtgatgatgggtacctgtagtcccagctacttgggaggctgaggtgggaggatcacttgagcctggaaggccgaggtcacagtgagttgtgatcatgccactgcattctagcctggatgacagagagagaccctgtctcaaatataaacaataaaaataaaacaaaaaattgtttaaaagtttacaacaagatttatacacaagaatgaggataagaagtagctggctccggccaggcacggtggctcacacccataatcccagcactttgggaggccgaggcaggtggatcacttgaggtcaggagttcaagaccagcctggccaacatggtgaaaccccgtctctactaaaaatacaaaaattagcctggcatggtggtgtccacctgtaatcccagctattcaggaggctgaagcacaagaatcgctggaacccaggaggcagaggttgcagcaagccgagatcacactaccaccctccagcctgagtgacagaaagaggctctgtctcaaaaaaaaaaaaaaaaaggtagctggctccccttttgcttcctcttcatgaaattataagggctgccagttgggagcaggtactctacctctgttgtcttatttaattcctacaacaaccctatgggagaggtagcattgaaagtttacagatgaaaacctgaggctcagggaggtggtgtcatgtagctggtcacacagctaagaagtggcagagaaggatttaaatgcaggtctggctgatcacgaagctgctgctcttacctacacagttacaccaaccctggcctccacgttctctggcctctgggttatgttcttcctccccacaactcctattctcttcaagagagggtagtttcatgagtgagctggttctgggtcaggctgagccaggggaggctcacaacctctgaagctctgtccctccagcagccaaaagcacacttgtcatgaaataattacaaattccaagaatgagaaagtagtaattaggcactgactgggagcttgaagatctggatttttatccccagttctgtgagggaatctttgcctgagtcactttcccactctgggactcagtttctccatgtgtgaaatgaatctagtaatgcttcttgagtgcctgccacgtcctggcaggcttttaggtgctttacattcagtatatcggcacacaactgtggacagggttcttacagtattacagggaggagactgaggctcagagaggggaaggagcttgtccagggtggcagagcttgggagtagatgtgctggaccagagctctgcttttagtctctgcactgtttatatttattcctcaagccactgggcttcgacgctgatcagatgctgccaggctgagtgaaagggctctgcatatagagcgccaatgctggacaagagtcccggggtgctgtgactgggtcatgccaaccacattgccactctggaaagaagaagaaggaataaggctaggaatctgacaccaagcccagcaaactctgtggtgggggtcatctggagcctaccaagtaccagatgctttacatatgtcatctaatttaatcatcaattcaaccatgtgaggctcagagacgacaaataacttacctgtggcccggttcggtggttcagacctgtaatcccagcactttgggaagccaatgtgggagaactgcttgagcccaggagtttcagaccagcctaagcaacatacaaaaaaaaaaaattagccaggcatgctggcgcacacctgtagtcccaattacttagaaggctgaggtggaaggatcactcgagcccgggaggtcagggctgcagtaagagcagcgatcatgtcactgcagtcctgcatgggtaacagattgagaccctgtctcaaaaaaacaaaaagaaaacaaaaaacttacctgtgatagcacagctggtaaatgacaaagctgaagtttcaaccagtgtctgtatgtttcccagactcacagagagaacgtaacaggattactgctgtggctggaagaggccaattctgcagcacccaccggtttgcatgaagtttcaaaacagctgcagacatccaaagcactgggtaaggaggccatcctgtagactgtggctctgacagttactccagggtgacctttagcaggtcccctaacacctatgagccctgaggggggtgaaatggaagcaccccccaaccagtccacgttaccacatagactgtaaaatgccgcccactagtgaatggcctcttttgaaacactttcttgctgttctctttgtatatggagttgaacctgcagtggaaaatgtgattgacagggattaacatctaggccccttggggcccacctggatgaaccctcagtggaagctgggatcatgaacaatggatatggaaccactgtaagaccaggtggcccctggccctgatgaagagagtcagggtgtatgtggggtggggaatggagcaatatggttgtctgtcctgatggtcctgaatctctcatctcttccctgcataacctacagtggcatgtcttgaaacccccttttttttttggagatggaatctcactctgttgcccagatgctcagctcactgtaacctctgcctcctgggttcaagtgattctcctgcctcaaccttcccttcccagtagctgggattacaggcacgtggcaccatgtccagctaatgtttgtatttttagtagagacgaggtttatcatgttggccaggctcgtcttgaactcctcccctcaggtgatgtgccccccttggcctcccaaagtgctggaattacaggtgtgagccaccggcccggccttgaaaccctttttttgatgctagaaatggcataggtataggaggccgggcgcggtggctcacgcctgtaatcccagctctttgggaggccgaggagggcggatcacgaggtcaggagatcgagaccatcctggctaacatggcaaaaccccgtctctactaaaaatacaaaaaaaatagccaggcgtggtggtgggtgcctgtggtctcagctactcgggaggctgaggcaggagaatggcgtgaaccagggaggcggaggttgcagtgagctgagatcgcgccactgcactacagcctgggcgacagtacgagactcggttaaaaaaaaaaaaaaagacgaaaaaaagaaatggcacaggcataggaaacaaaccagtattcagaaataacttggatcggtgagtggggaggttattctggggagtctgccgtgccttgggtaccctcattgccacacaaggcacatttttagccccaaagggaccaactgccagctggccagcgaccacctcaactccgggtaatgagttccatatgtttccataagagcccagctaagcttttccccagcagttcttacagtgttctctccctccctgcctcatctcgatgcttggccacccttgttctatttgctcctaacgagggtggcagggagggggctaggtgggcaatgccaagagacaatgctttgggaagtcacccttccctgacttcatttttgcagatcctcaagctaagaggcagtctctcggcctctccaggcttccgctgccccatctctatagtgggaaaaacaacccttactcagggtagggagagcatcacgaaaagagccctggatagtaaagtgggaggctggtgttccaatcccaacgtgaacactaacttgctgtgtgtccctgagcaggttcctgcccctctctgggctacatttgtgacctctaagggcccgcccttccatccctgacaagcttcagaattacaacaaatgacttaaacagcaaggaagaacatctgctttcctgggtggcttcagggtaggggtccccaggaagcctaaggcctccctaccctggccaccctcactctaagcccaggctccctttgacaagtctggccgggtgagagcttctgcctgcagcatcgggcacaaagtagaagcagggtagcagtgaggagaggcgtcccccgatggaagcacagctccacagctcagaaggcggaggcgggggggcgcctatggtcagcccccaacgacggcgagaggtgaatatgagttcaggggacttcagagaactcctccctccttaatctggtttgtcaaaggcaacccccaaagtcccggtctcaaggtgtctcactaccctgatcccgactgcccaccgaccctacccaaacacggactcactaaccttggcttttgacactgcccacagacggacccccacagcctgactacccacatttatccctaaagcctgccccaggctggcgaaaccccaaatccggccacgctctgacccccgatctcagccacaaagagactccgtgaccttgccactgactgacccctaagaggagaactaatcagagaacaattaaattgctcgactctcagcgaagcacctcatggaacagaggggcggaggtggggaaggacttcgagagggcagaggcttcccggaggagcccagcgggcctggggccacactcggaaggccgggaaggccctgtgcagggcacgtcgcaggcgctcgaggaatgcgagttgcctgaaagaacgaaggaaggaaggaaccgggtgcgatccagggcggcctcgcggacggggcaggaagcgggtgggggtgcgcagaggctgcagcggcccgagcgcagctgggggcagcgggagaggagtggggtcagcgactccgctgggtggggggccccccaggccgcgaggctgggaaccgggaggccgcgctgctggcggagcggcgggggcgccgcgaggctccggatgggctgcgagccccgcccgcaggctgcggagggagccggagccagagcggagccagagctcagacatccgggcgccagcgaacacctgcgagcggcccccagggcccgcggggggagcgtggggcgccgggaggggcggggcggggaggaggcggggccggctcggctccgccctgccgggctccaggccacgtgggccgaggctctgccccagcccgggcgccgcagcgccgccggtggggagcggctgtctccggggaggtctgggagtgggcagagtggagcccttggaagcagcgctgcgggaaagagcgcggcaggaggttctcaggtttagcctggggcatggggaagagtcgtggccacgaggggtgatgaggccgggaagacagataattgaaggttgtccggcgcgtccacagctagagagctataactggctttctgaaaagggcaccatttctggtgtcacagacatgaatttgaattctggctttgttacttagaagccgtgtggccaccggcaagttacttcgcctgttctgagctagttcatttataaaataaagacacctcccaaatgtctgtatttcacagccgatgcgatcagctctgaatccgatcgcatgcgacaatttgcacaagacactcagcagtgaatcttgtagttaaggaagcctcgtggatactttatgcgccttatagtttatccgaacaacacacatggaagggaggtaccgacatccccctttcacagatgagggggagtcctaggtctttcattccacaagcgctccctgggacaagcaccccctggggaccaagcatgtgccaggctttgggaatggcgagggaaaagagccaatttgaagagaaggcaagaacatgagctttgaagctagaggaagctggggttcctaaactctgctctgctactttcttgctgtgtgaactgtttcttgctgtgtgccactttcttgctgggtgatcaagttattcagcctgagtcttttttctataaaccaaggaatgttacccatcacggtggtttgtgaggattagaacaaaaatggaagataaaatagtctggaacctggcaggcacttccataggtgattatgacagaagacactatcctctctgggagttatctgacctagggccaaattgctttcactctctaatgactaatggattggcatgctggtctttcttttgtcctggccacctgaacaactcagtcctgggagtcctgacaggcaatttccttggaattagcttaataatacctcgtaggtgtgtgatgcatttcaaagaactttcccaccattatcttctgtcctgggaggcagcagggcacagaaggagcatggctcagagaggtggaatgcttgctcaaggtcactcggcagatgaccaccgcagccctttttagccttccacggtactgaaacttccgagcaaacgggaggcaacatgctgtggcagaaaagggtataagacgttgagctcaatgcctggctctactgcagttcatggtgtaatgtggggcctaggacctcagaaccgctgccttagaatcagcttcctttacagatgcagaaactggggctcaagagaggcaaagtccctagcctgaagttatacaggtaagaggtgacagagcagggatttatgtccctttatggtcgtctctaaagccagcacagcacacctaaaaaacaatccaagatagacccaacccaggccttgtaggtggtttggggcaagggttcctcacatgaggattgaagtctgctattgctctgcactgtgtgtgtatttttttaagagagtgttcatatcttccttcagatcagagtgaccaggacacagaacaggttaagaaccactgatcaggctgggagtttggttggcaatgccagaggttctcctcctcccccatgcccctgttcaccccagcaagctcaccagggttaaggcactaaaggtgatgacgtgacctgtttgttatgaaatattgaagtaattcatgccagggaccaacacacagatgagatcataccataaacaggaatctctagtaaggccaggcacctggtgaagcccacctggggagccaccaggggtgtgggggaaggcatgggttgggatcttgctctctgccccactgccaggcctggcctcaaggaatggccagtccccagccctgctcctgttcaccacaatcaagtcacggttcaaatcccatctctacctctcaaaggctgtgaaaacctggttcagaagcattacccacagaggttccctttccccatttctgaaatagggatagggatgcttacagaataggttcccaatggaggtgatgtagaaataccagcagaaatgaggactgtggagtctctgcctcacattccttgttcagggtcggactccacaaccacctagcattaaagaagggattactatcagtacttcccaaccagcatccaaatctttatccatttcaggagacctccctcttttttccaactttggaagcccgcaaggaagccagcccagagagcaagaaggaaatgaaaccaggcccagttatcagtttattcatttttggaattggtctatcaaccaccacccatgcctgggcaccaggtgaagcaaacttgaggctctcctcttaccacatcccctgctagaaaggcatagtcaatagtaacaataaagaggaaagctactgctagatctcaagggacatgaaaactcagttttcaagttgcctgagccaccaactttcaagttgcctgagccaccaacttgctgggcaagcttgcaccagtctctggtttcatctctgaaataatgagcagagcccagaacttttctctgcacccatccctcaatggacatgagactcccatcatgaacccttctctctccaccccatcccctctcaaccaggcagtttttcatttccctctcgtagaataagcaagttcactttcccaaagctcccaaaattcggccatgtgcgagaaagcatcattagtacttaatggagacgggtgtcatcatatacacaagtgtttaaaaatcgtttattatgcaaaatgttaacttttataaaaagtttaatatacatcgcattgttacagaaagtcaccttcctgtaaaaaaggtacaaaacctatatactctattatagagttcataaatcagggcaacagaacctttctccaaggagaccagaagaccagctctgccgccgccttggcatagtttggagagcagccactccttccacacctccacgctctgaagagaccttagaacttgggggtggggtgggagcagggtgacgtcgcccagctggtggccagagctagctctggctcttcaggccacaagttcacagtccttcgctcctgagcaccaggtttagtctccaggaagggatttggtgaagtcaagtgggcagggcgaagttggggcccatccctgccgtccggcttccggcaggagaggttcccggggtcccaggcagaacgggcgccagcacctgcgttctgggcgggggaggaaagaagaccaaggagcagtcagtttccgccgagcgtgccgaggcgggggccgtccgcagactggccggcgccagggaggaaacttggtctgtacctccagctgataactccgcgccccacgctgcccccacccagttggcgccaaagaccacaggcggagcttgcgctacccctcctacttggaattgacactagctgggagggggctgccgaagacagctccctatacaacatggaacagaaagacttgtatttagtcggacccatgtctactttgccagaccctcggccactgcgggagggcagggcccaggcgcatttaaggcttaaatgcacatcacatggaaactgactctgccattcatttgatgcaaccatgggcaagtcacttgtccctctctggcctcagtttccctaaaccgagtgagtggcaatttttcaaaacgtctgccaactccaggacttgccgtttaaacctccctctccaagagaggagatactcacctggaggtgtcaggacacggccgagtcagtggcaaaagctccttttgtcgttggagatgacaagttccggagtgagctcggctgtctgattagaggaaaagagggaagagttacgcgaggcaatcgggagctccgagggtcccgcagcatccttgcctgggtgttcagccctgtcccgacttcgaggcttacctggatgggaaggtgggggccatcagggggtccaggggctggctcggccaggactacctgcaggtcgagaatgtagtcgatgacgcgctgtaggatttccacctggctaagctgagtgcctctcgggactccgggtaccagttcccgcaggcgggagtagcagtggttcatgtcgtccagcaagctcagcggctcctcagctgccgggcccttccctcggccccgggcgatggccagactgcgttccgacaggcagcacaccgcctcgtagcagccgcgcaccgggctcagcgccttcatgctggggagtgagtccagaggtgccccaaagagaaagaaaaccaaaagaagtcccgctacagtgacctgcaacgcgcgcacgctcgccgcggcggtcacttatagagcctgcctggaaggcacgcctctttattcaaaatggcccgcctcggccctgcccccgccggccctgggcgttcacagcccgcttaaattgcaaacaggcttcctccggctggtctgacgccgaagaccgcggagccgcggattcaaagaatgaggaagcgctgataccggggagaggcgggcctctccgccagcaaggatttaaaaatcactcaaaaccattaacttccagaatttgctttttcctggcagcaccccagatctttgagcttccctgccccctgccagtccgcctttagcccaacactggttcgagccacagctcctccgaggtcataaatccctgaacagcaaagaagctccccccaccccccgttttttttaagcgaaagatttttcaagggaaacttgtaaggaattagtgccgccttgttccccaatttgctgttcgtctgacctccagactcactggcgtcaggaattatcttgtgaccagagggaaaaaaaattaattgcggtgaagctgaggttacaatgaagaaaacagatttgcgctaggcgctgagattgcagaaggaggagggaaagggggtttgagcaaagaacactatttatttgagcaacaggggaaaagaagaaagcttgagcccatgctttttgcatggggaaaaaaggagcctggaccctctgccccataaactccataacgaactaaatatatgcacagttgtgctttgtgagttcaattagaattttggacaaggttttaaatatggaggcacagatgggacaatttctacataaacctttttaagagcccccccccacccaattgggtcagcaaatttcttaacttcccctctcttcactttccacacacctctgtgtagaaaacagtggtaatttcattgctctattgtctgtccctttctgctatggaagggcaggccacctggacttgattattcttagccctgctgaagtagctccagctccatctgaaagaccaggaaaggaaccagagggccggcaaactaagtcctgtattgcaacaggacactgtgctcagtattctttgattctttgcttgccttcttgtcacctccctagacatttggggacctgcacttccaagatgctgctttccattttggaaatgaccaagtgggattcccccaatagttgctttcctaatgaatcattggtgaatatttatggagtccctccgcataaaacagtggctcctgctttcaagaatctcacaatttggggagacaagattaacacaggaaacaagagttcgataatgtgtggcactgattaacaggacaagggggctcagagccaaagagagtcgcaaaacggttgaaaaggacactgactgggaattgagagccctgggttcatcatgctagccctgacaataatttgtcatgtaatcttgaacaagcccaggtactctggctttaattgccttgtgagtaaaatagacgatggtactaagtgattatttaaaatcctttccaattgtagaagtccaaggttgtgtgaaatttggatatgtaggtgaaagatgctgaggggcccaaggaaggcatttaagacatgcccaatgtcacactacaagtaatagcagagccagtcttgaagcctcgttcttttccatcaaaccacagggctctgtggcccaagaaagatttcttcctggaatgtttttttcaaggacaggctcttcagtaagaaaagaggaagaaaacctgtgagtgggcaagtcagtctttacatgctacagccgtcaagtgccagctatttggtcaggaaaggcaaaataatggctgtaggaactcctgaataaccgaagagaagatccttcttttcctatcttgcagacttctgtggcaaaacggtcaagtccagagggttctagaaaaatcacgggccaggcagatttctgtgcaaatgcccattcttcttcttcttcttctttttttgtttaaactaattgtgtagactttggctgagttatcctgggtgcttctattttcccatctataaaatggaactaattgggtctactcattcattcattcgataattattgaatgcctcttctctgcaaagcacttgatgtgttcactccatctgatcttagtcttcttactgcctgggggacccagcatgggccagttgtgtggaaggtgctcagtctacccagattctcctcccttcttttccttcctctactactgcagctgatgcctcaggcttgtatagtgatttaggtttgcaaagcaccttcgcatttattatttcccaggatgcttccaggctgaaatgcccatgggctgtgtgacataaggcagaaggatgctgtggaattagcaagcaaaattctgttctgtgcatgccaataatttgcagtgtgcccttggacgaatttcctcccttcctgggcttcattttctctttaaaaaaaaaaaaaaaaaaaagatagtgggtaggttgggaggaagcaagtgccctttaatggtcctctctagcctaagattctaattctgaaagaagcaggttatggttaggaacactgaatagtgtttaaacccaagagacttctttttccccacagcagactggacaggctagctcaggccttctgcaacttgtttagcagtggtggggcctcagcctcttattccaaatgcctctgaactttctgttcccagttctgctccttttaccagctttttcccccctcttgcattttttatttttatgaaaggatgtcattaaggcttttgtctgcgctgtttttgtttcagaacttttctcacaatcctattttttgttgaggaatccgctcctttgcccagctgtgggtcccggtcccacagctgtgttgatctaagactcagccccagacagcctggcgccagggtgggacgtcatgcgttcacacagggatgcgtgtcccaggcaacctttcctcgggcagtcaccggccggcgactgcctcccccaccaatgagcgccggacacccgagaaaggggcggggtctgcatcgccccaaccgcgagcggcttgtgaattgcagatgctgagaacttgataatgttgcttcaattggggccctttaaagtctttttttttctttctcttttagttctttattttcttttgtctattccctttctttccaccttcttcctttatctatatatgtgtataatttttcttcttcttttttctaactatctcctcccagtgtcaggaatcattttgtaagcatttccaggaactcaatcttcctctgccaaaataaaaaaaagaaaaaaaaattcaatgttgtgctctctgatttttttttttttgagaagttggcagaactctttaagttatactgttttgttttttaaaaaattttagaattttttaatttcgtggtagtgggctctctaaattgttgatttcaaagtcaaagtaatgatgacaaggattgcagatgcctttttgtctaagctgagcctctatttattatctatctatcatctttttcccatttatgtcccagacatggggatcatggggacctcagaaacttgctcacgtttacttgggatgtcagtagctggcctatggccagaacccagacctcctctcatttgactctctgtccactctgccctctctctcttttttttttttgggatggagtctcactccgtcgcccagggtggagtgcagtgttgtgatctcggctcaccgcaacctccacctcctgggttcaaacgattcttctgtctcagtctcctgagtagctgggactacaggcgcacgccaccacacccggctaatttttgtatttttagtagagacagggtttcaccatattggtcaggctggtctcgaactcctgacctcatgatccgcccgacttggtctcccaaagtgctgggattacaggtgtgagccaccgcgcccggcactcttaatagcattagggtggtcttagaacattcccaaatgccacatttcataatatgtatctccttgctcataagtgcctagaaggtgtggtgaggactttgcagtcacacacatagaacatcccttctccttctcctcccctcagagagtctggagcccaaagtattgcttgagattcaggtgatacaaggaaagcacaggggattcagaatcaagaccaggctcaatccttgccctgacttctcctaccttcactctgtctcagctgtctcttctattaaattgggaggaaaataccatccatctacctcacagctgggagagtcaaaggggacaagggatggaaaatggtgtgggaaacagttatttttatgtgctgtaatgtgatgtagcccctgttgagtgggataggtggtaccaagtgagttgagtggtccctgctgaggctgttgtcaggaatgtgaggagcatcaggatctaaggcatgagtccttacaggggtggggatttcaaaggcctccaggatgggctactctctaactcagaagcactcagcgccaccgccaccatcatcattcattgagttctgtttgccaagtcctgtttgccttcttacacattttcccgctgatcccttttatagacagagagacagtggctcagaaaggtgaatgtgcttgcccaaggtcacatagctagataagtggcaggtccaagatttgcacccaggtctgcctgtctcccaaagcctgtatcctcctgcacctatgcttctccttctgccctcacaaaggacctcctgggaaggtagcttggacttgagagggttttattctaccagatagggaaaagcaaaggtaaatccattaggtagggagacagacaccgaagtgttggggtactaggggaaaacattgttttctgtgcagagagactcagaaagcattggaatttgttggaaatctaaagcttttcctccctcaaatcctccctcaaagaccttcctatccatacttacgttttaggagatgtttattcttttttttttttttggagacagagtttcactctgtcacccaggctggagtgcaatggcatgatctcggctcactgcaatctctgcctcctgggttctaagctattctcctgcctcagcctctggagtagctgggattacaggcacgagccaccacgcccgggctaattccaggctggtctcaaattcctgacctcaagtgatccacccacctaggcgtcccaaagtgctgggatttcaggtgtgagccactgtgcccggccagattattcttaaagcaagtacacagtaactattcctgtttttaggagtcagctttagagttgagctccctcttctaacccagagtcagcctagcttcagtcagccacaacgccctgaagttaattaaccccttacttcagcaggcaggcagtaactacagaatgcccacggaccatctgggattgagggctgagcacccacagggaagcaggaagggaattcattttctgaggaactgtcatgtgttcaaagtttcataaattttattttaataattggccctcgagtttttttgggtaggtattatcatgatcattttctccacaaaaatactgaaattcagctgggcatggtggctcacatccgtaatcccagccctttgggaggctgaggtgggcggatcacctgaggtcaggagtttggaaccagcccggccaacatgatgaaaccccatctctactaaaaatacaaaatttagccgggtgtggtggcgggtgcctgtaatcccagctactcaggaggctgaggcaggagaatcgcttgaacccaggaggcggaggttgcagtgagccgagatcacaccgctgcactccagcctgggcaacagagcgagactccgtctcaaaaaaacaaaaaacaaaaaccaaaaaaacgaaacaaaacaaaaactgaagttcaaagagatttatccacacagctgacggggaaaaggagaaaacaatcagaatttgaatccaggcctatggctcaaacactgatacacacaaagacagagatcttcaagctgctcagtgtccagacacaaaaggactggttccctcatccttgcacttctaggctaatgagtacagagacagcctttgcctcatttctctgttaagggaaaagtttgaaacttctagactttggagagcatcagtaggttatgtaggaatttaactcagacttaacaaacagcaaaagaaaaagaattatgaactcataatgcagagtttcactacttccaaagcaatttcattcagtttcattgaacattccccgcaaccttgtggggcacacagctcacctgcttcgtaatcaagtcttatttgtctccctggagtcagtatccttcacggtgcctggcaccaagtaggcacttaataaagttgtactgaattaagttccaccccattaattgcttttgggagacaacttagaggggggatttgagactcaaatgcaggctgtgctggatgactgattctatgactcccaggcataatgttctttgctgtagacagatgctgatggttggatttgggaccccactaatcagggttcaggaaaggccttagaatgatggggtccaaggtaagaaaagatgaagtccaaaaaaggccttgaaaagcaatattcacctgcccaaatgtgttggcctaggtctcagcagtagttcaatggctgagagagtagagaggtcgggaagggagggatgtggcctggggaccgagctgaccctgcctgagaggaaagggcttccctgaccctaaccgggccagagctctgcagtgagctagagatacgggggtgccagaaagcagaggtaggggcgcagctcagagagagcctcctgctggccacagctatccctgagtgtaatcaagtggcccaagcatcagcaggcttaggaggatcttttgcaaagtgccagtcatgaaccagacattttacatgtattatcgccctcaattctcatatcagttgaggctcagagaggtgaagtgacttgcccaaggtcacacagcaactgggaggcagaacagagtccagagtttatggtttgcagcatgagccaggccaccaattggcgggagaaaggaatcaaatgctggagaatgggaactgtcttaataagaaactgggggctgggcatggtggctcagacctgtaatcctagcactttgggaggccgaggtgggcggatcacctgaggtcaggagtttgagaccagcctggccaacatggtgaaaccccatctgtactaaaaatacgtaagttcggctgggcgcggtggctcacgcctctaatcgcagcactttgggaggctgaggtgggtggatcatgaggtcaggagatcgagaccatccaggctaacgctgtgaaaccccgtctctactaaaaatacaaaaaattagccgtgtgtggtgctgggcgcctgtagtcccagctactcgggaggctgaggcaggagaatggtgtgaacccaggaggcggagcttgcagtgagccgagatcgcaagccactgaactccagcctgggcgacagagcgagactctgtctcaaaacaacaacaacaacaacataagttcgctggacgtggtggctcatgcctaaaatcctagctactcagtagactgaggcaggagaatcgcttgaacctcggcagtggaggttgcagtgagccgagatcatgccactgcactccagcctgggtgacagagtgactccgtctcaaaaaaaggaagtatgtatttgacatggattttgtttcacagaactttatggtgtcaggcagtgtgtgtgtgtgtgtgtgtgtgtgtgtgtgtgtgtctcagtttctttctttttttgagaggaagtcccactctgctgcccaggctggactttagtggcgcaatattggctcactgcagactccaacttccggattcaagggattctcctacctcagcctcctgagtagctgggattacaggcgtgcgccaccacgcccagctaatttttatattttttgtaaagacggtgtttcgccatgttggccaggctggtctcaaactcctgacctcaagtgatccgcccgcctcagcctcccaaaagtgctgggatcacaggcgtgagccaccgcgcccgacctcagtttctgagtgtattcctacctgagaatatgctgtccacccttgtctgagtgtggggctgtccttgggggctgtgcgcggggtgcgcctatgtgtcttcctccctgggtgtttcagcctgctgtgtgtgatgtgtccccgggtctagtataggatcttccctgggtgtgcggctttctatgtgcgtgcttcagtgtatgtccatcttcccccaatctcctagccaggtgcggaacagggccaagaggacaataggctcgagcgcccaggtggccttttcctccactccctcacccaccgcgaccctcccctcctgcaccccgcgccctgactgccccctctctggccctgcccgaccttccgcggccctccctgcccgcgccccggcggccccaccctggccctacccggccctccccgcccgcgccccgcgcccggcggccccaacccccggcggtcccggacgcgcagctgcgggacacacaatcgccggcgccccctctccgccccccgcgcagcccctcgtccaacaaaagccgctttctttccccacaacagattaaagaccaggagggggtgaaaaatagcttctccggccactggcgggggaggggcgcgggaaaagctgggactttggggactctttgatagcgagtgtgtgggaaacccgaaggaatgtggctgttcggaccgccgcggcggggccaggcgccgggaggagggtccgcacctcccccgctgggactcccgggacctcccggacccccgcggccccagcgtccctgcggccccggcgtccccacgccccacgccgccagcgccctgcacgccgcctcccgccagctgagcgtctcccgcgccccctgcttttcctcccctagtcaatttcctcacattctaatttccttactttcttctcactttcccttccaattctccttttcgcgagtcccctattctcgtcctccacctctttctctatgtcttttgctcaagtctgttcccctcgtctccctccccgggtctttatcttgatctatacattcttttttttttctctttgtctgggacacactctgtgtctctttgtttccgtgtctcttgctatttcttggtggctttcctgggttgggtcccagggatggtggatttagcaccgtcgctgtcgccctttctcctgcccatctggaagggctgggaaaagcaggccagggtgtgggcagtttgtttaaatgtccctctcccgccacacacgtgtgagtgcaggtgggcgctgggcagggaagtctggggagcccaggaacacccagggaggagctgtggggaggcctggccagctagaccaggatggagcagggatggggggactcgtggaagcctccaagggtttggaattatttttggcccggtataattcagtctctgaaaggaattcctggcccaggaccggatggtggccttgggacccttatgggaaatgagttgggtctcctggccccctcctctctagtccttgggacaggctagtgggaggaagggggctggttcaagacaaagggcttccaggtggctgaggaaggagaccttccatgtgaagacagcgtggtacagtggggaactcagccctggatcttggaatcccagctttcccctgggctctgccactccctgacaacctgggcgaatcccttcttcctctctgggcgtcagtttccccacctgtaaaatgagatgtttggaccagtggccttcagcctttttttccaccctcagattgtaaggtctgatttgttccaaatgcattgcttatattaatgaatctgctttcatattttgtgtttatgaaagacaagcattcagtcaggctttctgattagcatgcttcattaccatgcagaactggtctaattcaaagaacaaagacaccccagccaaagataccctagacagactctcgaacagagataccccaattccagctaaagacaccccagacagaccccaaaagctcttggtgttttagtagtctgtgcagcaaaatcccatggaagaagagcacaggctttgcagtcagacagcttgggtttgaatcctgactctgccagtgtccagctgtgaccttggggaggtcacacacaccctccctcagttttcttatctggaaaaaagaaatattcatgatatccacccccacataattgtattatatcagataacagatacaaaaatttaagaaataggtgctcaatgagagttaggatgttgatgctttatacgaatgctgtccaatagaacaataatgcaagccacaaatgtaattttaaattttccagcagctatagttaaaaaagcaaggacagtgaaattaatttttttttgagatagggtcttgctctgttgcccaggctagagtgcagtggtgtgatcatgttcaaactgcagcctcgatgtcctgggttcaagtgatcctcccacctcagcctcctgagtaactggaaccacagatgcgtgccaccaagcccggctcattttaaaattatttgtagagacagggtctcactatgttgcccaggctggtctcaaaaccctggactcaagctatcctcccacctcaacctctcaaagtgttgggattacaggtgtgagccactgtatctggccttaaaattaatttcagtaatatactttacctaatccaatatattcaaaacattatttcaacatgtgatgaacacagaaaaactattattcctacattattttttatacttagtcatcaaaatctcgtgtctttaattcagcacatctcagtttggactagatacatttcaaatgctctgtagccacacatagctagtggctaccaattgaaaaactctggtactccagatgtgtgccaccacacctggctaattttttttaaaaaattgtgtagagatgaggtcttgctatgttgcccaggctggtctcaaactcttggcctcaagcagtcctatcatctcagcctcccaaaggaattacagtcatgagccaccatgcccagcccagatgagattttggtacgtgaagacagggcaggagaaagactggagggaagggggcagagaatggtatgaacaaagctgctcaggtgcagatcacttgattgggcaggagcgaggaggtggagaggtgcaggccaggattgcagaagtagatggaggtggggtatctggagagctttgaatgccaggctaaagagcacaaataatgtaagcatacttccagggggaaaaaaaaaagaatttggtcagttttttcagagtgactgtggttatgagatccactttattcagggaagaaggcagccgttctctgggtactgtaactattcctgtttctattgaaacctgttagtgctaactatcatttactgaggatttactatgaccaggcgctatgccaagcactttgtgttaataatcctgtttaattatctcagcgaaccctcatatgctgctgatgggaaggtaaaacttcggaaaacagcttggccatttttaaaagttaaatatcagccgggtgtggtggctcacgcctgtaatcccagcactttgggaggccgaggcgggcggatcacctgaggtcaggagttcgagaccagctaaccaacatggaaaaacctcgtctctactaaaaatacaaaattagccgggtatggtggcacatgcctgtaatcccactgtaatcccagctgctcgggaggctgaggcaggagaatcacttgaacccaggaggcagaggttgcagtgagctgagatcgctccgttgcactccagcctgagcaacaagagcaaaactccgtctcaaaaaaaaaaaaaaagttaaacagcaatttatcacatgacctagcagttcttctcctagatctctacccaagagaaatgaaaacaagtctacccagaaactcatacagggatgttcacagcagcattgttcatgatagcaaaaaagtggaaatgactcaaatggccatcagctgatgaatggatcaacaaaatgtggtgtattcatacaatggaatattattcagctataaaaaaggaatgaactactaatctacacaataaatagatggacctcaaaaaatatgcttacatgaaaggagcaagacacaaaggaccacatactgtgcagttccatttatgtgaaatttctaaaagaaatttctataaatttctaaaaatttatagagacagaaagtagattaatggttgcctgggactgggggacagaaggggagtgactgctaatggatacagggttttatgtgggggtgatgaaagtattctggaattgatgtgatggttgcacgactctgtaaatgtgctaaaaatcattgaattatatacataaatattggtgaattttctagtatgtaaattaaacaccaataaatctctttttaaaaattctcccaacaacttttttttttttttttttggagacagggtcttgctctgttgcccaggctggagtgcagtggcctgatcatggctcactgcagcctcaaccttcatgcttaggcaatcctcctgcctcagcctcccgagtagctggaaccacaggtacatgccaccacagctggcaaatttttttttttttttttgagatgaagtctcactctgtcgcccaggctggagtgcagtggtgcaatctcggctcactgcaagctccgcctcctgggttcacaccattctcctgcctcagcctcctgaatagctgggattacaggcgcccaccaccatacccagctaatttttttgtatttttagtagagacggggtttcaccatgttagctaggatggtctcgatttcctgacctcgtgatctgcctgcctggtcctcccaaagtgctgtgattataggattatagaccactgcgcccggcccaatttttttgtacttatttgtagagacagggtctctctatgctgcccaggcttccaaacaacttttgtgacagatactattatcatcccatttcacagttgcggaagcatcagaaaggtgaagccacccgcctaagaccgaagagctagaagcaaaagagccaaatttcaaaactgcaaagtgttcctgacctctgggctgtcctgcttcctggaaattgcttgggcagtgcgctccatcttcctggggcatttaacccacaagtttgctagcagccatgttttcaagctgcaacaactacttcttggatggtgagaattgggagagatggcagaaggcctggggaagagtggggatgctgggaaagcctcctggtgagaaagctcaggccacagctgggccagggacatccacagcagtctccaggctctgacaccccctccccaaccctgactccctcccaggggagagaataacttggctccaaagctgaggccagaatataagccagagacctgctgacctgacccccccaccctggaatctactgaatctggggccaggagcaaggaagggctgaccccaaactgaacaaatcaaaaagccaagttcccctctgagccctgcaatttttttttcttttggaccaaataaggaaggagcacctgttactttataatcatactgtaggacagcctcgagttgaaagccatgggatctggagtcttgaaaacgcggttcaagctcctatcttttctatttccaaactcagtgtcctagagcaactcactcactttccccaagcttcagtttttctatctatgaaatagacaatgatactcctgttaagagggcgcttgtaaggatttgggggaccagaggttaaattcgcttcattttagttcacctacgttacttatgttttgttacatgtcttaagttatggttttaataatccccccactcaaaaataaacaagattaaaagaataatgaaaatagttaataataagtgtcaacatttatgggcactgattttgtgctgtttcaagtgctttatacacattaactcatttatcttcataaaaagcctatgaagccattatacagatgaggaaacaggctcagagaggctaagcatgttgttcaaggtcacacagcatggaagaggcaagccgactgactccagagccttagctttgtgccagtcagaatggaaaagaactccaaaagacaccaacctggtttattcaagtgctggcatgtaaggataaggaaaagcagccatcagtttgaatgacaggcgatgggtccggagtaattagccaaatgtatgaagatttcaccatttctaaaccatcctgttatatgaccacacataccatcttcatggaagtgcagtagcatcaccatgacaactacttttgtgtttttacctctaatgtaatcgattgtattttaaaatatttttaaatgaataaaagcttttgaatttaatgttttaagtaggtaatactttcacctggttaaaaactcaaaaagctcgagaggcataaagtgaaaggcctccttctcaccccggcccctgccatcctcttctcacagtcagccaatgttgctagttttgtggggaggggaagaactgatactttttgaaagtagaaagagtgtgcttgatttgttctgaggtcacaagccataaagcccaccttactctggttgatttcttcaggtcggcctcagcctgatttcctgtaccctttgaggcactgctgcttcctgcaggtgatggttagtcccttagggagatggtcagtcccttctccctctgaactttcccctgaggcacccccttcagtacccgctatgctcctgaccacattctctctggcctctaggcctgactggttctccatcccccagaacctgcagagcctgtaaatgccagagaaatctcatcatctcacacagctgatgtggtagaggtggacccagaggtcacacctgggtggcttcaggctatatctagcctatgagattttttgttcttttttggtctgcacagtgatgtcagaattggaaatcttcacctgaaagtccaattttctgatttcacttgaaatattggcagactcagccacactgaacccatactgatgcatgatgatgacagctggagctgagcagcagttgctcccttgagaaggagcacaagctctctgggttgtatggtccccgccactctgggttggttaacatggtaggcaggatcatagtcacctccaaagatgtctgtgtcctaatccctataatttgtgaatgtactgttacacggcaagtgggaattaagtttgcagatggaatgaaggttgctatgcaggattatctaggtgggtccaatggaatcagaagggtccttaaaagtgggagagggcagcagaaaagagtcagagaaagagaggcaaccacgaaaacagggtcagagagatgccatgttgctggctttgaaaatgaaggaaggggtcacaacccaaggaatgttggcagcctccagaagctggaaaaggcaaggaaatcaattatcttccagattctccgaaagggaagtccctgcaaacaccctgattttagcccagtgagatcaggttggtttgagagcataaacttaagttgttttaagtgactaagtttgtagtcattttgttatagcagcaatagagaagtaatacagttaatatgggcccttgtaggtctccagggatgggggagtggggcacagctgtgagagctgttgtaagtgtgcaagactcatagcttaaagagctcggtaaatggccatgaatgttctaatgaataggcgtagcaggcgggttctgggcagagtagagatatgggtgacccttgctttggttttttctccctccactcttgtgacaccctctgcccagtttccttcacagccctggggcttgctgagagagccgggctgatatgtcaggccttcagcattgagtagggcaatcacttagcaagttggcaggtctcagcagctggtggaggaatctgggctctgactgaggacaggattagaggtcaaagtgggaaagtagggaataggccccagactgagtaaaaagaccaggagagctgaaggtgggggagggtcaggagcaggttctgaaagggggtgcaaagctaggcagggcccagacttgaggcctgttctaggtggtgctggctggtaggggaatgactgatggtctaggattgctgaggacaactgtgcacctgccagcactgtcctaagcctgcctctgaacactaagctgtcagcctctgtttaccttccactctcagtataacctgcattcggcctatttgttgggaggcaactgaaaaactaatttatcctgaattattcttagtgactgatagtggcttactgtgtcagatacttgccaaggagattcatgttgaagtgcatatcattttaacctaaaaagatgaagtgcatttaaggtagcagtgtctgagaaggaaaacctcatggctactggtggtggggggtggcagggaacataggatgtcacacggtggacagccttacctgctcacagggctgtacacccccaggaggtctctcatattccagcccccatgtccttaagtctctttagatttttttcacctgggctttcattacaattcttttactttccgtgtttcctgggtaagcttgtttatatatttttagcaaacattcatgtaacactatgtgccaggcaccattctaagtgctttacaaatgtttatttaggtaacagaggtactgttgcctccattttacagataaggaaactgagacacagagaggctaatttgcccaagaccacgtggctagcgagtggctacactttctgagcctcggctttcttggctgttaaattgatatgtatatacaagcgccctctgcatagcagggcttctcagacccaacactattgacattttgggctggataattctttgttgtgaggctgtcctgtgcattgcaggatgtttagcggtatccctggcctctaccacatagggtattcactgccaagagatgccagtagcaactcccactcaagctgtgacaaacctaaaatgtcccctgatcttgccaaatgtcctctgggggcaaaatcaaccctagtttagaaccactgcctaataggatcctggggaggattaaatgagctatttcatataaaataccttccggcaatcccttccccattccttccataactctatggtgagttctaactcctcagaaccctcttgttctttctgttcctctactgtttggaaaatgtgcccacctatggagactgggtgcttgagagcttcttgcaaatccaaagctgttccaggagctagacctgattccagtcctgtcatttccacagacatgctgtgggaccttggctgaagtccttcccctccttgagcctcggtttccccatgtgtacgagggggctgacccagaagctttccgaaaggtcttctcactgcaggaatcagtgactgggtgattcataccaagtgcaaattcccctcacaaagtccaaattcttccagcgacttagtcattccagggtttgaactttctcgcaaaaaccatttgaaaaattcttccagcttaaaaaaaaaaaaaaaaagctattaaaagaaagtaaaagtttcaaaaccaaatcctaggcaaacaaccctgaaaacaatacacacacatacatatacatacagcacccaaggtagctctgagaacaggatatgaaaccttgcaggccggcactaagaaatgattcacaggcctttgagatgcttctatttcaagacacagtccacccactggatctggtggctccaaaaacaaactttcagctgctgtttcttatcgcagtgtggttcgcctggccagtatccttgggtctcaagagctccagacagaagacaaggttgagtcctgtgaattccctttctgttctatttcaagcctcaagctgctggcttgtttaaagaaagtcttttgcatccaccttttggttggctgacccgagtttaaagcaacatagcctaatgggttcgtagcacagcctgcgaattcataattttagtttagcaaggcctctgtgtggctccagcaagtcctactggatcctgggctggtcattctagaagctgtctccagctaaacaatcctgcctggctttccttatacatatcaatattatacttgccctaggccaggattaagaattttagcacaaattcaaaatttcatgcttttatgtaaaatagaaatataaaagtaattcattcgatgaaatgcttactgagtgctcactatatgccaagcaccagcaatgtactggcgataaaatacagcccctgccttcaggagccacattgaacaggaaaagcagacaatctaaatatacatagtagaaacacatggaactattccctatgggaaatgccctgcataaaaagtgataccaaagttggagcaaaattgaaagaaatgcaaatgcttgtgatacggttaagtacattttcatctgtacttacccttgattttgttttagatttagaaaatcttgaactttcactgttgcttcatttgccctccaaaaatccagaatcttacagaaagggtcagtgtctggatcaaacatgtttcttatctaatttccttgccccagtttttgtttatgccatcattgctgcatggagtcctccctcctctccttgtgtatcctccaagttctgatgcaaagcccacttcctccaggaagcattcgcagacccatctggccacatcctcgctgttctctaaacacacatatctcatgctcttgacttggcctttagcctgtcctgccttatgatctctcttgtacttctgtcctgaagttttatctaacttatgaattgggggaaagaggacaggcactgacatttattaagtgttttattggtgacgggcattttgctagctctttactgtatataatgtgcctggtatgtagaagatgttcaataaatatttgttcaacgaatgcttcagtgatttggcttaaacctaacaataaccctatgagaccaattctattagtattcccattttacagataagagaactgaggcacagacaggtaaagtctgcatttgagggctttctgtcttaaaagttgaagttcagactttctcttcttctctgttgcttttttctgcaaatagatttccctgaagtgtcttgattaattaataggacatatactgtgctccctgctttatcccatctcaggcaatattacctgttctctccgttgtgagcccatatttgtatttctacagttagtttagaaaccactctgcatcaggcgtggtgactcacgcctatagtcccaacactttggggaggctgaggcgggtagattgcttgaactcaggagttcgacatcagcctgagcaacatggcaaaaccccatctctacaaaaaaatgaaaaattagccaggcctggtagtgcacatctgtggtctcagctactggggaggctgaggtgggaggatcatttgagcccaaaaggtggaggctgcattgagcgaagattgtgccactgtactccagcctgggtgacagagtgagaccccatctcaaataaaaaaaatcatcaccccaccattacctgtgccttgtctacctttcccactagaccataggcagcactaatgtagtatgactgctgtgcccctggctggcacactgctcatgctcagtgaagatttgctgagccagggtggtagtggtggtggtggtggtgataacaataggttgagtagtgatgttccccaaaagatatgtgttaatttttttttttttttttttttttttttttagatagagtcttgctctgttgcccaggctggagtgcagtggtgcgatctcggctcactgcaagctctgactcccgagttcacaccatactcctgcctcagcctcctgagtagctgggactacaggcgccggccaccatgcctggctaagtttttgtatttttagtagagacggggtttcaccgtgttagccaggatggtctagatctcctgaccatgtgatccacctgcctcggcttcccaaagtgttgggattacaggcgtgagccactgtgcccggccagatatgtgttaaattttaatacccagtacctgtgaatgggaccttatttggaaatagggtatctaaagatagaattaaggatc

SEQ ID NO: 25 - DNA, 1594 bp, Homo sapiens
  Genbank Accession No. S63168
cccggggcgcccccgcggtgccggagtcggggcggggcgtgcacgtcagccggggctagaaaaggcggcggggctgggcccagcgaggtgacagcctcgcttggacgcagagcccggcccgacgccgccatgagcgccgcgctcttcagcctggacggcccggcgcgcggcgcgccctggcctgcggagcctgcgcccttctacgaaccgggccgggcgggcaagccgggccgcggggccgagccaggggccctaggcgagccaggcgccgccgcccccgccatgtacgacgacgagagcgccatcgacttcagcgcctacatcgactccatggccgccgtgcccaccctggagctgtgccacgacgagctcttcgccgacctcttcaacagcaatcacaaggcgggcggcgcggggcccctggagcttcttcccggcggccccgcgcgccccttgggcccgggccctgccgctccccgcctgctcaagcgcgagcccgactggggcgacggcgacgcgcccggctcgctgttgcccgcgcaggtgggcccgtgcgcacagaccgtggtgagcttggcggccgcagggcagcccaccccgcccacgtcgccggagccgccgcgcagcagccccaggcagacccccgcgcccggccccgcccgggagaagagcgccggcaagaggggcccggaccgcggcagccccgagtaccggcagcggcgcgagcgcaacaacatcgccgtgcgcaagagccgcgacaaggccaagcggcgcaaccaggagatgcagcagaagttggtggagctgtcggctgagaacgagaagctgcaccagcgcgtggagcagctcacgcgggacctggccggcctccggcagttcttcaagcagctgcccagcccgcccttcctgccggccgccgggacagcagactgccggtaacgcgcggccggggcgggagagactcagcaacgacccatacctcagacccgacggcccggagcggagcgcgccctgccctggcgcagccagagccgccgggtgcccgctgcagtttcttgggacataggagcgcaaagaagctacagcctggacttaccaccactaaactgcgagagaagctaaacgtgtttattttcccttaaattatttttgtaatggtagctttttctacatcttactcctgttgatgcagctaaggtacatttgtaaaaagaaaaaaaaccagacttttcagacaaaccctttgtattgtagataagaggaaaagactgagcatgctcacttttttatattaatttttacagtatttgtaagaataaagcagcatttgaaatcgcccctgcttcctatattcgcagtgactcccgcccgcccgccgccgccggtcggaggacccggctcggaagggcgttccggaccgcagccagccagcacctagggagcccgggcgccaggtgtgtgtgtggggggggcggggggatgggcgcagcggcgagctactcaggagagagggtctgtcgcttttaaaacgcattaaaggctctctcctggccttatttaacttgcctaagctaggtggagcacggctgagctc

SEQ ID NO: 26 - DNA, 1293 bp, Homo sapiens
  Genbank Accession No. M83667
cacgtcagccggggctagaaaaggcggcggggctgggcccagcgaggtgacagcctcgcttggacgcagagcccggcccgacgccgccatgacggccgcgctcttcagcctggacggcccggccggcggcgcgccctggcctgcggagcctgcgcccttctacgaaccgggccgggcgggcaagccgggccgcggggccgagccaggggccctaggcgagccaggcgccgccgcccccgccatgtacgacgacgagagcgccatcgacttcagcgcctacatcgactccatggccgccgtgcccaccctggagctgtgccacgacgagctcttcgccgacctcttcaacagcaatcacaaggcgggcggcgcggggcccctggagcttcttcccggcggccccgcgcgccccttgggcccgggccctgccgctccccgcctgctcaagcgcgagcccgactggggcgacggcgacgcgcccggctcgctgttgcccgcgcaggtgggcccgtgcgcacagaccgtggtgagcttggcggccgcagggcagcccaccccgcccacgtcgccggagccgccgcgcagcagccccaggcagacccccgcgcccggccccgcccgggagaagagcgccggcaagaggggcccggaccgcggcagccccgagtaccggcagcggcgcgagcgcaacaacatcgccgtgcgcaagagccgcgacaaggccaagcggcgcaaccaggagatgcagcagaagttggtggagctgtcggctgagaacgagaagctgcaccagcgcgtggagcagctcacgcgggacctggccggcctccggcagttcttcaagcagctgcccagcccgcccttcctgccggccgccgggacagcagactgccggtaacgcgcggccggggcgggagagactcagcaacgacccatacctcagacccgacggcccggagcggacgccctgctgccgacgccagagccgccgcgtgcccgctgcagtttcttggacatagaccaaagaagctacagcctggacttaccaccactaaactgcgagagaagctaaacgtgtttattttcccttaaattatttttgtaatggtagctttttctacatcttactcctgttgatgcagctaaggtacatttgtaaaaagaaaaaaaaccagacttttcagacaaaccctttgtattgtagataagaggaaaagactgagcatgctcacttttttatattaatttttaggacagtatttgtaagaataaagcagcatttgaaatgcccct

SEQ ID NO: 27 - DNA, 2040 bp, Homo sapiens
  Genbank Accession No. AF109127
gaaggacggagccgagccgcggctgcctccctcgctcactccctcgcgcactcgcccgccccctccctccctcccctcccttccccgggcccgggtctggccccggcccattcgctgttgggtcttctgctagggaggatgtcgggttcgtcgctgcccagcgccctggccctctcgctgttgctggtctctggctccctcctcccagggccaggcgccgctcagaacgagccaaggattgtcaccagtgaagaggtcattattcgagacagccctgttctccctgtcaccctgcagtgtaacctcacctccagctctcacacccttacatacagctactggacaaagaatggggtggaactgagtgccactcgtaagaatgccagcaacatggagtacaggatcaataagccgagagctgaggattcaggcgaataccactgcgtatatcactttgtcagcgctcctaaagcaaacgccaccattgaagtgaaagccgctcctgacatcactggccataaacggagtgagaacaagaatgaagggcaggatgccactatgtattgcaagtcagttggctacccccacccagactggatatggcgcaagaaggagaacgggatgcccatggacattgtcaatacctctggccgcttcttcatcatcaacaaggaaaattacactgagttgaacattgtgaacctgcagatcacggaagaccctggcgagtatgaatgtaatgccaccaacgccattggctccgcctctgttgtcactgtcctcagggtgcggagccacctggccccactctggcctttcttgggaattctggctgaaattatcatccttgtggtgatcattgttgtgtatgagaagaggaagaggccagatgaggttcctgacgatgatgaaccagctggaccaatgaaaaccaactctaccaacaatcacaaagataaaaacttgcgccagagaaacacaaattaagtactgcttacaatatctttaggttcctgaaactggtggcaacatgacctgctaaaattttctgcttggacctctttggttctctcccctttcaagtgagcaacaccacaatgactgtctaaagcatgccttatttagcctctcctgtaagggtgatctagccaggtacattttaaacaatgcttcagtgtagaaggtgtaaactattttgggcttgatgtgctgtgaatgttgcttttttttttcctttgttaaaatatttaaatagaagtgaaaaggtcctctgaggatcagatcatgcatgcgccattttttacttaatgcagctgttaaattggcaaagctctaaaatgcactgctgccatctagtgatacacttttgtaaagtacagcaaaacctacaggtatatacagcatataaatatatatatatatatatttatatttttgggggtgggagaaatccaaaataaagtaaatgcttgtttcatttttaagctgctgatattcattccttattgtatgttgtcagatgaggaaattgtgcagttctggtacataaagatgagtaatataaactgaaatctataattttaagggcttaacctgtgactttaataagctggaacagtccactgaatgggtataatgaattgcagtatatacgtatgattgctttttaagtgattatcttttcttctgttaagtcatgtaaattcataaatccttttgcactgatgtgttgaaccttattcttgtacattcattcaatcaaggcaaacttttataatttttcttttgtttccaatgaccttgaaatgttatagcatggtaatattctatgcaactatagttatactttttggtttgacactgtattttttcacattgatttactggttgatgatagattttataacctaacggttctcatgcggtgcgtaattgtagatgcatgtacttgtgtgttttgtgtaactattgaagtgcaatgatgtataaaaaagtggattcacctgtttttaaaaataaaacattgataaaaaaaaaaaa

SEQ ID NO: 28 - DNA, 2388 bp, Homo sapiens
  Genbank Accession No. AF109126
gaaggacggagccgagccgcggctgcctccctcgctcactccctcgcgcactcgcccgccccctccctccctcccctcccttccccgggcccgggtctggccccggcccattcgctgttgggtcttctgctagggaggatgtcgggttcgtcgctgcccagcgccctggccctctcgctgttgctggtctctggctccctcctcccagggccaggcgccgctcagaacgctgggtttgtcaagtcgcccatgtcagaaactaagctcacgggggacgcctttgagctgtactgtgacgtggtcgggagccccacgccagagatccagtggtggtacgcagaagtcaaccgggcagagtctttcagacagctgtgggacggtgctcggaagcgccgtgtcaccgtaaacaccgcctacgggtcaaacggcgtgagtgtgctgagaataacccggctcaccttggaggactctgggacttacgagtgcagggccagcaacgaccccaagaggaatgacttgaggcaaaacccctccataacatggattcgagcccaggccaccataagcgtccttcagaagccaaggattgtcaccagtgaagaggtcattattcgagacagccctgttctccctgtcaccctgcagtgtaacctcacctccagctctcacacccttacatacagctactggacaaagaatggggtggaactgagtgccactcgtaagaatgccagcaacatggagtacaggatcaataagccgagagctgaggattcaggcgaataccactgcgtatatcactttgtcagcgctcctaaagcaaacgccaccattgaagtgaaagccgctcctgacatcactggccataaacggagtgagaacaagaatgaagggcaggatgccactatgtattgcaagtcagttggctacccccacccagactggatatggcgcaagaaggagaacgggatgcccatggacattgtcaatacctctggccgcttcttcatcatcaacaaggaaaattacactgagttgaacattgtgaacctgcagatcacggaagaccctggcgagtatgaatgtaatgccaccaacgccattggctccgcctctgttgtcactgtcctcagggtgcggagccacctggccccactctggcctttcttgggaattctggctgaaattatcatccttgtggtgatcattgttgtgtatgagaagaggaagaggccagatgaggttcctgacgatgatgaaccagctggaccaatgaaaaccaactctaccaacaatcacaaagataaaaacttgcgccagagaaacacaaattaagtactgcttacaatatctttaggttcctgaaactggtggcaacatgacctgctaaaattttctgcttggacctctttggttctctcccctttcaagtgagcaacaccacaatgactgtctaaagcatgccttatttagcctctcctgtaagggtgatctagccaggtacattttaaacaatgcttcagtgtagaaggtgtaaactattttgggcttgatgtgctgtgaatgttgcttttttttttcctttgttaaaatatttaaatagaagtgaaaaggtcctctgaggatcagatcatgcatgcgccattttttacttaatgcagctgttaaattggcaaagctctaaaatgcactgctgccatctagtgatacacttttgtaaagtacagcaaaacctacaggtatatacagcatataaatatatatatatatatatttatatttttgggggtgggagaaatccaaaataaagtaaatgcttgtttcatttttaagctgctgatattcattccttattgtatgttgtcagatgaggaaattgtgcagttctggtacataaagatgagtaatataaactgaaatctataattttaagggcttaacctgtgactttaataagctggaacagtccactgaatgggtataatgaattgcagtatatacgtatgattgctttttaagtgattatcttttcttctgttaagtcatgtaaattcataaatccttttgcactgatgtgttgaaccttattcttgtacattcattcaatcaaggcaaacttttataatttttcttttgtttccaatgaccttgaaatgttatagcatggtaatattctatgcaactatagttatactttttggtttgacactgtattttttcacattgatttactggttgatgatagattttataacctaacggttctcatgcggtgcgtaattgtagatgcatgtacttgtgtgttttgtgtaactattgaagtgcaatgatgtataaaaaagtggattcacctgtttttaaaaataaaacattgataaaaaaaaaaaa

SEQ ID NO: 29 - DNA, 1646 bp, Homo sapiens
  Genbank Accession No. AF035287
actggacaaagaatggggtggaactgagtgccactcgtaagaatgccagcaacatggagtacaggatcaataagccgagagctgaggattcaggcgaataccactgcgtatatcactttgtcagcgctcctaaagcaaacgccaccattgaagtgaaagccgctcctgacatcactggccataaacggagtgagaacaagaatgaagggcaggatgccactatgtattgcaagtcagttggctacccccacccagactggatatggcgcaagaaggagaacgggatgcccatggacattgtcaatacctctggccgcttcttcatcatcaacaaggaaaattacactgagttgaacattgtgaacctgcagatcacggaagaccctggcgagtatgaatgtaatgccacctggccccactctggcctttcttgggaattctggctgaaattatcatccttgtggtgatcattgttgtgtatgagaagaggaagaggccagatgaggttcctgacgctggaccaatgaaaaccaactctaccaacaatcacaaagataaaaacttgcgccagagaaacacaaattaagtactgcttacaatatctttaggttcctgaaactggtggcaacatgacctgctaaaattttctgcttggacctctttggttctctcccctttcaagtgagcaacaccacaatgactgtctaaagcatgccttatttagcctctcctgtaagggtgatctagccaggtacattttaaacaatgcttcagtgtagaaggtgtaaactattttgggcttgatgtgctgtgaatgttgcttttttttttcctttgttaaaatatttaaatagaagtgaaaaggtcctctgaggatcagatcatgcatgcgccattttttacttaatgcagctgttaaattggcaaagctctaaaatgcactgctgccatctagtgatacacttttgtaaagtacagcaaaacctacagatatatacagtatataaatatatatatatatatatttatatttttgggggtgggagaaatccaaaataaagtaaatgcttgtttcatttttaagctgctgatattcattccttattgtatgttgtcagatgaggaaattgtgcagttctggtacataaagatgagtaatataaactgaaatctataattttaagggcttaacctgtgactttaataagctggaacagtccactgaatgggtataatgaattgcagtatatacgtatgattgctttttaagtgattatcttttcttctgttaagtcatgtaaattcataaatccttttgcactgatgtgttgaaccttattcttgtacattcattcaatcaaggcaaacttttataatttttcttttgtttccaatgaccttgaaatgttatagcatggtaatattctatgcaactatagttatactttttggtttgacactgtattttttcacattgatttactggttgatgatagattttataacctaacggttctcatgcggtgcgtaattgtagatgcatgtacttgtgtgttttgtgtaattattgaagtgcaatgatgtataaaaaagtggattcacctgtttttaaaaataaaacattgataaaaaaaaaaaaaaaaaaa

SEQ ID NO: 30 - DNA, 3953 bp, Homo sapiens
  Genbank Accession No. M90357
ttatggttaatgttcttatagacatccaaaggtcagaaactattcccatttgaaaaatatctgttgtggtataaatgtgctgttttctttcctcttctccctgactttagggaactgctcgcagaaagaagaaggtggttcatagaacagccacagcagatgacaaaaaacttcagttctccttaaagaagttaggggtaaacaatatctctggtattgaagaggcaagtatcaaattttgttactttaaaaaacaagatttggctgggaaaagttaacgttaatgcattaaatgggttgttgggttttttttaacttagggacttcaaagtccctaagatgtgtttctaccataaattaataaatatcagggagctcattaagtctgaatgctattagaatacatattccattccaggcaaaatttcacctgtgcttacacgtgaaatactagttagccagagctagtttaataaaacatttgtttttaaagagactggtcagcattgctaatttaaatttttcttttcttaataggtgaatatgtttacaaaccaaggaacagtgatccactttaacaaccctaaagttcaggcatctctggcagcgaacactttcaccattacaggccatgctgagacaaagcagctgacagaaatgctacccagcatcttaaaccagcttggtgcggatagtctgactagtttaaggagactggccgaagctctgcccaaacaatgtgagtttcctagtaatggttttaccagggaattactcatttagcagctgatttctgatctcagggctcagaatggatatgagtatttttaagtttggaaatgcaagctttaaaaataacagatttgtaactgattttaagcaactgtccttgctcaagtttgcagtaattgatgtagcgtgccatgattgttacacttgattttgtggaatgttttctacttacttgatttggatcagatacttttattaactagaaatgatgaaaatgttaatttggtgctttgccaataactacttgtaagtttggaattgaaaaaaaaattagtgtaaattatgaaattacttcagtttcatctatatagttcgtattaccagtaatcttttaaaaatggcttgccagtattctggcattttaattacagtgtgatagggatttattcggggcagaaaatagtgtagctgaatatacatctgaggatgtggcagtgttatgctgttttctgtgcttaaaattttgaagaataggaatgcaggaggaagtcagaggcttatatatggctctttagttacccatgtttttctaggtattgacttaatctgcctcaattttcatttttattatcacattgagttgcaggttctaaactgtcagggctttcagagctgaaataggcttttgaagtatcccactgatgcctgtatgggcctagtacataactctcctgtgtacgttcatattcttgtgtgataaaggagagtggatgcttaccactcacagactctttaatttttttactttaacttttttcatttcagtaagtggttgttgagcatcacccttatgccacacacagagtagttgagaaaatggcatcttcatttgtctcccaaaatctcaccatgatttggtatgtgggttttacctgcactctaagagttccctactgcccttatactacctcaggcctatggtggccagaggattgaaagagtggtatggaatttgtttgttggcgttcctagtattttaacccatttgtagacattagaatatcatgttattgatagtatcataggataaaatcccaaatgtcccttatcatggaaataagttgtaacaacacttggcatttcatctgttctttttttttttttttttttttttttggtgaatatttattaaaaacctagacaaataatgtttacattttcctttcatagctgtggatggaaaagcaccacttgctactggagaggatgatgatgatgaagttccaggtaggaacgtttgcttgtggttaacctagagaatcttagccaagggagaataagaaatctttgtaggaaaaactacccagggaagaggggtggtaagttaagatggacatagatcttacttagaatgagaaaaataatgcagtattaggtaattgagaattatgtttatagacttgacttggcttgtttctgtttgggatcccaaggatgtgtaggtatctaaccttaaatattgaataaataagtatatatatatagtaccctaaatataactattacctgcagagcactaatgacccttgctccctactttgaaactcatgaatttacaagaaggtgtggagttgttcaggtatcttgggatatatatatgcattctaaaatctgtagcagcataactccttttgggaatcagaggattttgtctcttacctgttattggataaatttacgttcttctaaaatatttattgggcaggagaatcactggactcataaatattcccactttgcatagacaggtatccttaggaatcaggaaaattttaacattgtgtgtcattgtattctttggttctgctcccccactattgaccaatgtagagatgggaagaggggggcatttttttctcttttttttttttttgcattcttgttcttggggctatgacacagtatttatcatcattggcaaatgaatgctctttccttcatccccttttaatatctgataattatttgtagattggcttttttaagaatttctactctttttcttttcctagatcttgtggagaattttgatgaggcttccaagaatgaggcaaactgaattgagtcaacttctgaagataaaacctgaagaagtttactgggagctgctattttatattatgactgctttttaagaaaatttttgtttatggatctgataaaatctagatctctaatatttttaagcccaagccccttggacactgcagctcttttcagtttttgcttatacacaattcattctttgcagctaattaagccgaagaagcctgggaatcaagtttgaaacaaagattaataaagttcttttgcctagtatacagttttatttttttatttattgacaccgatctgtacacagtaaaaaaaattgcttatagaaagctaatcatggcatgtaatatggctgataacctttggaatttgattaaagatttaaaatcacggtgtaagtgtaacaaaggtggtataaagttctcaggtttgaaaactttgtctccaacagtccttagtgcttccatgatttatatggtgggtgtaaatatgagaatagagtattccttagtggataaacagacatttctccctgatattctctattgtaagcatatgttaagtgccttttatgaattaccctcggtgttatcttcctttattcctcaatttgtgaagaactaatagctccattttgtagatgtaacctgaggtttagaacttctaaaaagtaaaagtaatctccagatcccttctttgtaggatattttataaggtgacttggaaaaggtagtgtttagaataggagtggctcctgggtcattgtcttttccttaagtgtaacacctaataaatgaatagggttatgtttttatttaataaaaaatatacagtaaaattgagcatatacagttaaaagaatttataatgtctgccactataaccaggcttaccagacagtttcatggtccagaaaatccctaaacatagggttacttttaaacattttacaaattacaatgaaacaattgtgtaatctgaaccaaggccatttgaggagaaatagttctacttgtatggtatttatttttaaatttttcatagcaatttgcaagtaccttttgaaagtattatcagttgtatctaaaatgcactattaaccgtgg

SEQ ID NO: 31 - DNA, 857 bp, Homo sapiens
  Genbank Accession No. X74070
cttgcgtccccgcgtgtgtgcgcctaatctcaggtggtccacccgagaccccttgagcaccaaccctagtcccccgcgcggccccttattcgctccgacaagatgaaagaaacaatcatgaaccaggaaaaactcgccaaactgcaggcacaagtgcgcattggtgggaaaggaactgctcgcagaaagaagaaggtggttcatagaacagccacagcagatgacaaaaaacttcagttctccttaaagaagttaggggtaaacaatatctctggtattgaagaggtgaatatgtttacaaaccaaggaacagtgatccactttaacaaccctaaagttcaggcatctctggcagcgaacactttcaccattacaggccatgctgagacaaagcagctgacagaaatgctacccagcatcttaaaccagcttggtgcggatagtctgactagtttaaggagactggccgaagctctgcccaaacaatctgtggatggaaaagcaccacttgctactggagaggatgatgatgatgaagttccagatcttgtggagaattttgatgaggcttccaagaatgaggcaaactgaattgagtcaacttctgaagataaaacctgaagaagttactgggagctgctattttatattatgactgctttttaagaaatttttgtttatggatctgataaaatctagatctctaatatttttaagcccaagccccttggacactgcagctcttttcagtttttgcttatacacaattcattctttgcagctaattaagccgaagaagcctgggaatcaagtttgaaacaaagattaataaagattaataaagttctttgcctagt

SEQ ID NO: 32 - DNA, 109201 bp, Homo sapiens
  Genbank Accession No. AC000403
ggatcctctattacatgttatgtactatgttgagccttggggcaaaatagaaaaataaatgctttttctattctataaatgggcaaatagatgtcgagggtgagctaagggctcactacataacagaattagggctgctctatataatagaggcaagcaacccaagtcatcaatgagcctaaactcttcgtttctcttgcattcctcttgcttaaaaactgtgattttttttttattcaatgctttccaaaaaggaaagacagagaaagaagatatttccactgcccttttctttctgtatacagaaatgagagcttgctctaactttggattctactcttccctcacccacccaaaaagcagaatggagaaggataacgaattattattattattatttttttttttttttgagacagagtctcactctgtcacccagcctggagtgcagtggcgcgatctcggctcactgcaagctccgcctcccgggttcacgccattctcctgcctcagcctcccgagtagctgggactacaggcgcccgctaccacacctagctaatttttttgtatttttagtagagacggggtttcactgtgttagccaggatggtctcgatctcctgacctcgtgatccacccgcctcggcctcccaaagtgctgggattacagatgtgagccaccgcgcccggccccaggataatgaattattaagaaataaatgataaataactggggaaatgttttcagttactctaacaaaagagaactccaaataattaattttagaatctatcattcctatgcttcatctttttcactctgaaaaaaaggagggagggtgaagcggagatcattcttagtagctgttaagtgtatttaacagaattgtgagggaaagatagtgttcataaaatttcaaccatgaaatgtgtgtaaagtccaacgatgctaagttttttgtcatgtctggtagttatagaaatactttaacttctataagtacttggccagttgaccattttgctctctgttggtgacggtaaaggagaaggctgcgtctcaaatatattaggggctcaattaatggtcgttgaagctgaaaggatgacttcgcatttggggacttcgcatgcataataataggtgctcaatacagtacctactaaataattgatgaggtctctctaaagactctatgtctcttgatgatgagacctagggattaacagaacatcagagtctctcattcaaacatggtgtgtccaatatcactgcaaagaaatctcactcatgcataacctgagaggtttgaagggagaataaagatgaacaaaacctgacccactccccaccacccccattgcagccaggagatctgcacatggcttcgtgtggtcctctcatctggactcgcataaacagcctccttcctggtttctgactcctggccatgcctatcaaacccattcctcgcagagcccccaaacgttctctgcagaatggaattctctgattactttacaccttgcttaaaattcttcagtaaaccctgagaaccaaagttcaaatcttgtaatgggttacgtgaggctcaccctgatctggctcttactgcttctctatgcttttgtttggttggttggttttggtttggtttggttgtttttttggtgggcatagagggctttttgcttttgccatgaggtttcagcaacactgagctgtttctagttcttgctgtctcccgatcattcctcactaagctgacctggacttagcaggcctctcctctttctcttcttcacttttaagcctttgctctggtgtctcctcctctagcaagcctaagacctgacttaggtatctccctttctgactccctcagttgctcagactatcttagccctgatttccaagtcattctatcattatttggctctcttactgatcctcagcacttctgtgtcttagtcatccccgtttccctatcagattggcacagtgtggcacacagtaagtactcagagattttgaatgaatgaatcctcaatggctgctctacaagggggaaagttgcagcagccaagttaagagttaatggcctaaaacagcctcgatgacctcttttctacttcgccccatccactactcttaggagatctgtgagggtaaagaaggtgcccttgggccccagagggacattgaaacttcttacctgagcatagtaaagcagagaacttaggaggctgacgttttccctaaactatctctcaaaaatcaagcccagtatatgccaacagaagttctcaactctaccactaccaccatcgccaagttcctaacggcagaagagcgtgcactcattcctaggatactacaagctcagagtatctttaacatgtagggttttctctcttaaattcatgaaaatttctcaatccttccataaaatgaaacagatttttataaatcacttaccagtgaaaggacctaattcccctatccataggtacatatcttaattagtaaaactgagattccagaaggcaccccatatttcttctataacttcccatccttttccaaatccccccgaggtgcctccttaagaagtatgggatataacatggctcctctagatatactgtatacctaaaaccaaaatattggtcataattcattgaaaaaatctaaaatttgaaaggaggtataaaacaaagggaaggggccttgtttccaatataaaagctacataaaacttcacacttatatacctaatgactctagagtgatttcacaccacccccaccaattcctaaaaagcttccagtgaatcccactgtttccatagttcctcaagaaggaaaaagtacctcctggtcatttctctcttggcatcacttcatacaaaaaaagctggactcaaatatatttgcatatatgtaaaaagacattcagtacagcactctttggagtagaaaaaaaatacccggaattttaaatgcctatcaataaaggacttacaaaataaacgacagcacatctagacaatggcgtgtcatgtagaatatcatgtagctatcaaacaaaatgaggtagatcattgccacatgttcatgcattgcagtagctccaggatatgtagttaacaaacagaaagcaagacacagaacaggtgtgatttctacagaaaagataaaaaaaaaaaaaagggaggcctctaggaaaaactagcggttactggaggagggttaatctgtattacattttcaaaaaataatgtgtctacacacacacacttttaaaacaaaagctatccagaggaagtacaggcaaaaggaaagaggaagggtgaagcctggctcactctacccgcctgactcatggcttccggtgccataacccagacgacttgtttctgtgatttctcaatcttagcagcactgtgccttctttagagaggaggaacatcaaccactagagatgaggcagtaaagtgcccccacatcaaaaaatgcagctcctctttcccaacattttttagaaccttctcatgaactgtacttttaagtaaagcacatctcgaagcttctatttccctgtccctatacacagcaagtggcatatgctgcagagaagtcaaagaaaatgtttgtgaaaaacatttcttccatattaagtaccagaccgcctgggcattcttgacaataaactctggggaaagaagctatttgtgcttggtcctgctggccggttccttggtgaagagttctgatggcataatgctcagcagtagtcccacaataatttgggaagtgttgccagtatttagagaaccccgtaaatgaaattagaccagtgttcaagccaatccatgccaaggagccaagaggaataattaaaggagtgaatgttttattctttagtgtttaattgaatacataacaagtcacataatcaatgattcattacttcacacacaggaaggaaaacagtagctagtatttctgttatacaactggttgtgaacaggaagaacaaaaatctttatagcattagatggttgaagaaattctcaaagtttgggcatgtctgaaaagactttgactgcatcttttttcaatataaagggatttttttcttacatttctgtgtcattagaaaaatctgataatcttataagattttttctgctcttcttacatttagagaaaatggtttaatgatatgtactatttaaaaaatcagaatcccagataactctgtgtgaatcttacattgtctagcagataaggttttcagatgcctggaaaaatttaaacaacatataatttacatcttcaaaattaacatccagatggatgttttaatcctttgtcactaaatggttactaacgctgtttgagtggtcataaatgaattgtcatttgtattcaatagtaatagcaaaatttacctgcctataaagtcgcaaaaacagttgtataatagtttacattacaattaatgtacccatacctcaaaacacatttagaatttaaaaaaactggcttggaaaaaaatcacaaaaaatttaagtgacaacaaatcttgattaactagtccatcttcctaccacacatgattatactctaatgtagatattctggttgaatttcttccaaccaagtttgaagggccccagtagaaaatcaagtgttaatactttcagatttttattgtccaaaactgttgacaaagaaaagctaacttcaacataacttgtttctggctatacaaagacctatttcaggtgctacagatactgaaaataggagtattttacttatttctcaagagacagacttatgccatctaagaaaatgaattcagtttttaaatgatttatagtaaggaaaaacaggaaaacaattccaaacgaaggattgactctgataggcttacaacaaaaatattcagtttactattttaaaaactaaattgagtaaagtatttgtgatttagactataaaataaattctcaaggaattcaacccctccagtcaatactttttcttaatgtctgcattgtaatttagcattttgcatgtgggagtacacaaatgaattgaatattggatcagaatttaccctaacttgaagagtaaaaagttatcaaagtttcaccttacatggctttattgaaataacattccatcgaaaattccaataaaaattggaatatattatgagcactgccaattgctcattttgtctgatattaacagattatgcatttcctcagagaagcagtaggtcccatatatacagacatatatatggctctggtttgaaagagaagacaattttgtctagtattatgatttatcactgtgctatcaatcaaaaaccagtagaatacataacaacattgaaagggaaaaatttttaaatctcacatcttcaaggaatattttctacagcatatcatttgaaaaagtagaatgaatactgttcatggtccacatgtattaaaaaacatgtcaattacttggtgcaaacacacagaacctggtacctgttttttttttttttttaaccaccattgtctacacctttttaaaaattaagtttgttactaaaagtccaatgtcattcacttgtatttatgatcatcaaatggtaattagggcaacatatgtaaatgcatgcctctgaatcagattcatgcagtgttaattatctgaataatttatgacattctcccaggttatttgaatggtatctttggagggcttactcaaatgaacccacaatacctccactattacagcttataggaaattacaatccactttacaggcctcaaaggttcattctgtggcccaaagcccatggaggggaagggatctaaaggtgctcatgtcaagttattttacttgttttttactgtctacccaatgtaaaatgaattttcttcacagcctttactttaggctaaaaatagacagttttcttgtattgactttaactttagaggggacagtcgtccctggaaaaagaagtagatttactgtccctaaccattaaattcccagtctttcaaataatgtgcggggcggggggtgctgggtgtgacagggtgcagtgaataagatgcctatgtacaagacagtggaatagttcacctcaaaggtttacaagataacatttgtaagacttgagtgacagaggcaaaattttagcagtttctcaagactcttggagttgagcagatttgagaagggaaatcagaatcgccgagccttgccatctgtcagtggttttggtctgtcccaagatgttctcaatcatgtgcttcctgttgaacaatctaacaaaataccatacggggtagagaaatctctgcaacactgacttttggtcagtgaatcagagtcctaaattatttcaggcttcaaacagatgaattctgatgcattacttagtctgagaccaaactcaacatacaagcaagcacaacttcctagatttctgcttccatttcgcctaaaattacaggctttgtatatgaagtcaattttacttctcaaaaaatgttagtctaataaaagacctgaaatctatttcccaactaaaaaaaaattagtggattaaaaatacaggtaccttgactttaagtagacagttaatcaacatatgattagtaatacaactaatactcaagaaaaaaagtataatacagcaaactcagttttacaattatgtattttttcctaacccaattcctcgataaggatgtaagaaactcatcaaaacatgttgctttagtatataaaccagctgatgcaaattactggggtaatataggaaattttatagcattagtaaatgaattaaaaaactaaatgattcatgtaaaatgtttatatatggtatatacagcttggatcacatgagtctaagaataaaactgtcgatttgtaacatctgtatggacatagtaagatacagtacgagattcatttttaaaaacaaggaaaaatagcactaatttaaacactgaaaacagctcttacaaaatccttaaaaacgtacatcagagaaagatgctgaaaacaaaacaaaataggcttctctgtcatcacagaatatccaaaggacacctcacagcatggagcatgacgaggtttatttcccttcacttatggtttacataggatatgcattgggaatttattccatgtaagagtaaaggcataaggcaaccaggtctccttctgtttctgttgcatttacctattattggaccattttattgctcagctcacttttaagtacttatttgccttcatttaaaaatattccattttacagctatctacagataggcagcccttggtgctgagttctctgcagctcgtcatttgaaaggattccacttaacttcaaacaaactgcatgaaagtggcattttcaggttttcaggtttgcccagaagtcaacgtttgctgggcttggagaaaataaggatttttaataagtgatcttaggtctaagtaaccaaaatgaaacttcttttgcgcaatagattccaaaatcaggatttataatcaacaagaaaataaaagttcaaaaactaaaaccctactgggtaactctttggttagattatatataagcattaacaactctaagtttaggactcaaaacagtaagttaagtaaactgccaggtaagagtaggtctgttattaatctttataaaatacttggcatgtttgcatttactatatgatattttttaaatgtgcatatactcaaacagatggtacaaacttccaactttcaaatcataaatgactatgtctgcttctcccttcccacccttcctaccctttcctccctccccaccccaccccgcccaccaagtcttacagctaaaggaaggtcctactgacattcattgaaagaatacaggctttcctaatacccacgacgtgcactatgacccagctccctacagtcactgccaggtgacctcctacggcgcttggagacctgagcagccttgcactcttaggcggcagcgtcctttctccctcttgccagtaactgctgccatgtcaaccagtggaatcaagggcttctggcgagcagcagctgaaaagggcgcctctgcaggcaggcggatcactttctataagtttaagctacaggctgagaccttttattctgtacgagaaaggatcctttactgtcccacgcactagattcttctactttacgtgtaacttttcaaaactttattagtttagttactgaactgcctccatggggtcctaattccaggctcagaatcttccatccagccttctaaaactctaccttcaaaagaggtcaaaaagactgtgtaatgaccttgtaaaacactaaccccagacagtggaaccaatcctgatctcttaaacccccagtgagtcataagagcttgagaagatttcaaggaaatcttccgcacattggacacggtccaatcaggttctgaacaattcaatcatcccccggtctgtggccacactcccccaatagatccaaactgaagtaccatctgggggaggggtggtttgaggcagggagtagagaaagcatggagtggtaggtgggggtggggtgggggttcctctgggttctctcggttcaggaggtccaaagaagacgaagcagcccagaggatttgcggctgcaggttctgtagtggagggaaggtgggcggacaggtctcacccagctactactggagggggagaatgggagggcagcagccaggggacaaaggtgggacaagaggctctgtaatcatctctcgggcaggagaaggactgggcgctggagtggcgagggggtctggggagctcactccctgcagaagacgtactcggtgtagctggtccagatcttgtcctcgctctggtcggtgctgctggcaaaggcgcaggtgcccgtggagctgcacgccaccatgtggaagcccgactcggacagcttgtcgaaggcctgctccaggaagttgaacttgaggtaatagcgcgaggtgtagcgctccgggggacggtcggggtcccggctttcgttcagggtgtccccaaacacctccttggccagcgacgtctttccgcaaacggtgatgcgcgccactcgccggaacttggcgtccgcctgcgcgtcccgcccgatggtgtaggagccgcggtagccgatggtgatgtagcccgagcgccggctgccgtccagcgactgggacggcgtgagcagcgggcccgccgcgcccccggacggactgcggctagccagctccagcgtgggcgacggcgccccggcagaggcgccctcctgctgttcgggctccgagtagccaagcggcagcagctcgtcacccagcgagccctccttgtgcaccccgcgccgcgagggcggcggccccgggccgggctgctggggcgccccgaggcggcgcacgagctctggcagctcgaagtactcggcctcgcgctgcagccggctgcgctcggggaagtagtcgggcagcacgagctgcaagtcccgcaggtaatccaggatgtagcggaagaggaagccgtcccggtccagaaagaagcggcctttgctgtcccgggccagctcctgcggctgctgctgcgtgaacatgcgccagagcagcgagtcgggcaccgacaccaccgtgcagcgccgggtcacgtacacctggccccccacgttcagctccacgatgtcggggaagagcggtggctccgcggaggacgacgaggagccactgccgcccccgccgccgcccccgttgggtaatccacgtgtgctgtccgccagagccatgacagagaggtggccgggccgggacagtggcaggaagccgcgctgcactcaggagctgcaaccgccttccccggagccccggaacccggacgctcgctcagccctgcgccccgccgccgccgccgccgccaccgccgccaccgccaccgccgccacctcctagagccgcgcggagccgagcggtgcgagcgcgccgctgtgcgcccccttgagttccagtgcgctccgcccgccttgcccgcgcgctccaggcgagtgccgggtcgcggcccgcgcgctgcttaagtagagccgcctgctctggtgccgtggcgcgcaggaggcgtgggcggcggcggagcctcgcttaccgggcgaggggaggtggggagcggggactcgatttgcatcttaaacgcggacgccacgcggggctgctggctccaccccggctcgcgagcgctgggggcgcccggactcccacccgctccccacccaccagccccgccccgtggtcccgcccaactttctccctcttccgaagaggacccgcccgagacttggcggcttcggaagacagctccttggagggacagtcaccgcgccccctcccctctcgccccagcccgcacccaaggactctggaaggaggacgtgaactttcggaagcctgtcgccccgggagtggaaatgcgtggccgcctccggccctcccgcctgcggaactgggcgcttccagcagtgcagctgcggcctgccatcgttggttgtcgtgtcactgaaagtagagagacgcgaaaaacctggagagacgaaagagccgccccagtccgagcgcagccagattttgttcaagttgccttgcagccagcctggaaaataaataaataaacctagaaacaaaaagcaaacctcagtgtcccgcagtaggatgctttacgatagtttattttctggctgcagagacaaaatgagatgaagcttcaaatctgctcttaattgcaattccctcttcccgcagggccttcgaggcacttcacttcgaagtgaaggggtaagactccggaacgttcggtctccgggtcccattcagccttcgttgaatcgcgcccttagactcacaacagttgcagatctaacgtaatttttaaagccacctttggcgcctgcatgtttatccttccaaaagtccaggcgccccttctctcccgcatgcctcggtcactcttcggccctgtccaagttcccgtcagtctcagaaagggatatttatatatctgaaggcccttgtctggatcccatctctcaactcctgctgcctacacgtttgcttttccccctcggactgcagcccacagaaccgccccctccccctggaagctttccctggcttcccaggtgggtggggcctctggatggctccctacacactgtctgcgctgctcccagcacgttctgaaatgtcatatttatgagtgattatctgatcactgatttgggtatgaaaataagtaagagctcctgaatgctgcaaaaagagaagagtgcagaggagggtgtcaagaaatgattgggtcactgaatgtttcttgtgtacctgctattatttgcagggcaccagggagtgaggaatgcaaaggcgaataatctccaaagcgctttcagtgtagcccaataagcaaagggtcaggggtctgcgcagttatcacatcagtttgaagtatagaccacacatcaggataaatcaggcaagatctttgttcttgataaaatttatccttctgtgtaactacccagtgagcttcacagtctcctcacagataaatgtcatttttattttgaaatgtttatatctgctcaacaattaccgcgctcatgtcagtgtgctgaaatgagatcaacccccaaaccagttatcttaattgcaagtacagattttgatactgaatgtatttcaacattctttttttgttgttgttctgttctttgggataaataatagataacacaaaacttccaagtcccagtgcaggatttcgaggtggttgtgctactaggcgttatattagtgtcagagacctgacaaaaccagcctcttttctacaaatccaagaaaagccttctttgtatcagttctgcacatatttttgtataattaccattgctcattgcatcagcaaatcctgccagctctgtgttaaaaatctttctagactattaacgtatttcaccatctccctatcatcaccctggaccaagccaccatcatctcttgcctggattattgcactggtctcctaactgcttctacttctgctcctacagtcttgtatcaccagaacaaaaacagggaccctgcttataatccaaggctggtatgtcactctgctcagagcctgccagtggcttcctatctcagaaagagcaaaatccaaagtcctctcagtggcttacaagactctacatgtttggagttatcccaccagcacctctctgacacatctcctgccctgcccccaggagctggctggctttagccacatagcccctttcttgttttctcagggcctttgcacatccttgtaaaagtctcatttctcctccctcccgtgttcctcaccttgttcaggtccctcccttctcaccttcttcaggtctgcccagcaagacctttccttgattccacttcttaatgcagcacagcctcactgcagcttcctcttccttgccttatttgttgactcttttcctacatcagaatataaactccaagacttcagcagtttttgtctgcttggttcactgccacacccccactgcctagaacagagctggtatattacaggcatttgataaatatctgttgctcacgcaagcattcaaccactatttattcagggcctactactatattccaggctgcatgttaaaaaataatcactgcccactaggagcttatagtcttgcgagggagacaaataaatatagtataaagataagtaagcctatttcaggtggtgataaatgccacaaagaaaataaaattataagatgtgatagagggactgagtgtggaatactactttatacagagtgcctggggaaggcatctctgtgaatgtgacatttgagctgaataataagaaagagacagccatgggaagttttggaggaagagcattccaggcacagggtcaaacaagttaaaggggcctgagttatgagtgagctcacattgaaagtttatgtattgtgtcatctacttgtatcctgtgaatctccaaagtacccttgagatgatcagtacagagtcaaatgtgagtgataccgtgtgcttattcactacctgcagcctactatcatcattctctacatcttgacataaggtagtcatcaaccaccagctagtctactgcagaaaagccattggtatttccttatggaagccaggtaatgcatgagagatataataatgaatgaaacaggtgatttgaaacacaaggaatgtttttctagttaattttgtgtgttctgtttcttgcctattggttggtatcacagaattcaaaaggaaatactactggggaactctgatgctgggacttgagggcctgagtgtttataagaagagagtcataactctttagcatctccagtatgttaaatatgcttgattgcaagggattggggaggatttggaaacccactagccctgtgtttagtctcaaaccagtttctaatgatggtcattgctaattgatggtcattgctccttttcaagtaactctttgtattttcctgaataagatacagtgtgcctgcaagtaacctgtcctttgatcctaaagtggaggatactggaaacatctctggacctacattctcatctcatttgcatcttctcccccacctactgccttctcttcaaaccagcttcccctcccactccccacagtaatccttcttatccaaagtttccattaccatggtttcagttacccatggtcagctgtggtttgaaaatattacatggaaattccagaaatataactaattcataaattcaaaattgcacaccattcagagtagtgtgatgaaatctcccactgtcctgcttcgtcttgccctggacatgaatatccacacctctacactcccaacccatgagtcacttagtagccatctcagctgtcagatcaactgtcttagtatcaccctatcacagtgcttgtgttcaagtaacactcagtttacttaataaatggccacaaattacaagagtagtgatgctggcaattcagatatgccaaagagaagccataaaatgctgcctttaagtgaaaaggtgaaagttctcaatttaataagaaaaaaaaagttacatcccaaggttgctaagatctatgataagaatgtagacattgtgaaatttctgtgaaattatgaaggaaaaatttgtgctagttttgctgtcacacctccaaacacaaaacgtatggcacagagtgcatgataagtgtgtagtgaaaatggaaaaggcattaaacttgtggattgaagacatgaagagaaacatgttccaatggacagcaatcaggttcagtactacctacggtttcagtcacccactgagggtcttggaatgtataccctttgtatgaaaggagactactgtattctgcataccaaagatttaaggaaaggaatgaggaacatgaagagaaatataaagttaaaggggaggaagaactggtgaaatgaagtgagtgcctttgagaattgaatgaatttaatatatgtgaaaatgatctgtacattgtaaaacaccattcaagtgtcagaatcattattttccaccacttatcatggtgcttgacaagtcttcccaataaatactgaatgaacaaatgaatggcagaaacattaaaatgaacactatggggaaaggggaagagaggcagaatcagaaattatcctgaataaatatttattccatttgtcatcctcctaatatgtgtgaatcttttctccatgcaggctttagaagtcattgactttttgcatttagaaggagagattaattgaataacattaagtgaatccggaggcaaaatgatcttaataaagatttggtaaaagatgtgacaatatttaacctgaagaaaagagaacaaaatgttatatagggtacactgccaaaatactaggtctaaattccagttactcaggaggctgaggcaggagaattgcttgaacctgagaggcagaggttgcagtgagccaaggtcgcaccactgcactccagcctaggcaacagagcgagaccccatctcaaaaaacaaaacaaacaaaaaaaaaaaacaggtctagacagtaaagaatatcccaacattgtatgattatctctagagtatgatttttatgatttatagaaccaaacaaagaaacaaaagttaacaatgttgatatttctatacccttaagatggtgtttggagcttatccaggaaacaaataatataacaagcatgtatagagtacttactatgagccagccctatttatagaactatacatgtatgaactcatttaatcctaacaataactttatgaggttggtgctattacccaagttttagatgagaaactgaggcacagtgaactaattttcccaagatcatacagcaaataggtgctggagctgggatttgaacccaggcagtgtagccttagaatctgtgcttttaaacactgcattttaaatcccctttcctctaggagtgctttacatgtattaagaagtaagttatattattttccccctttacagatgagaaacccaaggcaaagagaagtaaggtaacttgaccaagataacacagctctttatctctgctgggggcagaaatgctactctaaagtctacgtgcttgtgttccgcagtactggtaaccagaaactcaaagtagccaccctgaaagaactagggttaagaaagagtcaagtccttggcccttatttcttctttctgccttcttttttccttccaacctattttaggtttatgggtacctgtgcaggtttgttacacaggtaaattgcacgtcgcaggggtttggtgtacagattatttcatcaccaaagtaataagcatagtacctgataggtagtttttggattctcaccttccatccaacctctaccctcaagtaggctccaatgtctattgttcccttccttgtatccatgtgtacttttacccaaataagaatctctatttgagcccctggatagaactgacacactattgtcctaatctttccctaattcagtcctgtacacaaaataaacaagattttatttctggctctctcaaatatcattacggtttgcaaagcaccaagttcctagcatgttcatttggctttattctgatctcattaactcttgacaaggataaagtgaatccatggaaactgctgagatctaggttccagtttcccaaagcaagcagtatccactggtcttctggggctcataaaattgaacaagtgcattctacttgtggctttgcatatcaaactgaacacaaaaatagctggccctcatcacttgagtgattctggaacttctgactaagactaattattaacatcactgatgtttcataagaatttgaaagtcttggtttccaatcatgatattaaatttagagaggaactatatataagttatcacattctaatcacattctagtgtttttctgtttcgagtgttttcatattgtcaggttgacttaattatcacaattttgtgaggtgttaaccaacctgtgttccaaatgaagaaagaaactcaaaaaggttaggtgactcacacctcctctcaggtggctgggatgcagtgctgggatgcacgtggatgcttcctgatttcatatcccatgctctttgaactcttcagcagccatatcagctccatttaacacccaaatgaaggttgtcattcaaaataatcaccttgaagactatatactcctttgagggatgctggaatcactcaccatttttggtacatttgtttggaaattttcttcaaagccaatttacacaagaatatcaccctattattttatacttatgttaaagttgtagttgatatctttctagggctctaaaacagggcacctcactgcaggacagacccacatgcctgaaaataaattaggacaaagccagttttcatgaatgaaactaaggtgatgatcatcgggtattcaccttttgacattgggttttaaagatctcatccctagagttctctaatatgctgaatagcattgagtttaggttacttagaaagaagggctgattcaactgcagagattttaatatgtggttccagaaagtctgcatattttattgtgaggtttgcacaagaagccaagccactggctagactgtaatggttgatttcttatgtaattgtaagatcatttatttgatataattaagggggaaaaatatatttccccaatttgctttccagttactaaagaaatatgcataatatttcacagtaagaaaattgcctcaaaacatgctaaactttaaatttacattacttggtataatttacttttaaaaaatacatttcttttcctacagtaaaatatagatgggaaaatcatacactttagagtttgatgaacctgtatccttctcctggttttatttaaaatcagatattggtcatagttatttaaatattctaaacttcagatatttatcttaaaatggagcaaaaataccaacctcatgggactcttgtgagattaaatgagatgatacaaagcattttcttccacaatgtctggcacataacggatacatcatgacatcatgcatgtaggtttctgctcccaccctttcattcccccattgccattgcacttctataattcagagttccttggtgagtttgcttacctcattcttcaatctgtttatcactctctcttagatgatgtctctttaacagtaactaaaatggacagggtaaatggcacttcctcagcagttccccatttcttcctaggagtcagtcacatctaacacaaatttactctctggttggaaaatttagtcaaaatctagacagctgggaaccctcaattccagggcttatttctcatcctagactttgcaactcaaagtacagttggcatagttttatctccgtaactaaaagttcagctattggcaacctctaggaggtaaaggctgggtaggggtgagcagaagtgttctaaagagggccttaaaaactccaggtatccttaaaatccaaagacaatgactttttctctgttctaaacccagggacttaagccatgaaatgttgaggaactgagcctaaagagggcaagagcaccatcccaaaccacagctatggtgtttccccctagcttccaggcgacagtggctccacaacaggaagaacgtgtgcacactgcaaaggaaacagaagttttgcatggctgcaacagattttactggaagaagtatcaacagtgcaagtttagctcccctttacattgcattcaacatcccttcaaatatttatagagcacctgctatgtgcctgatcttgccagaagttatggatggttccacaggtccttggcccatgagaacctgtacaatatcaaagtaagtgactagtaaaatagcagggacatgccacaggtgaagatcatagggagggaagttaccttcctgcatgagtcagaggtttctagagaaacaggaaagatactatacaaagctgacctcaagtaagtcaggtcaaacaaaacacttttcctcagcattgctaatatctcagcattgtgataatactgtagacataagtatattatattttggcaaggtatctgacagctcattcatgatctttttggataagatagagaaatgtgtgctggacaataatatcaattagatggagacatggttgataaaaacagacattcaaagattattgatgaatgaaacaatgcgtaactgaagagaacgggttaggagaaagattctgttttagcttttttctattgaatttttatcagtaaattaaattaacatgtgggaattatgctaataaaatgtatagttacacagagcttagtgggctaactaaccaaacaaatatggaattaactttcaaaattatccacataggtttcagcaagaaagagaagcaaataagagaggatgtagtaagtataaaggtaaagttatgcaattgcttatgacacagtcgagcagtttacatgaaaagtgacctgggagtctgcatctactgcaagtttaagaagccaatacagtggcatgactgtaacatgcacaggtacaaacaccaaatacaatcgcttttcaacattggaaaggaccttataaattatttatgtcaaatctttcctcttacagatccaagctgaggatgtgatagtaaaaacacaataactgacagtaaaactacacctagcattcacatatctttaagtctaggcatcacaagcttaagagttatcttaataggcaagagtatatttgaaggagtataagcaagcttgtgaagaatccaaaaacaatgtaatagcaagattttttaaattttagcatagaatagcttagaagagagtattactggaggcagtgtggcagcttgtcttagtctgttcacgttgctctaacaaaataccataaactgggtggcttataaataacaggaatgtatgtctaacagttctcatggctgagaagtccaaaatcaaatcatcagcagattaggtgtctagagagggtctatttcctggtgtgcagatggctccttctctctatgtcctcacatagtggaagaggcaaacaagctccctcaggcctcttttatcagggcactaatcccattcatgagaacctgatcactcccaagaccgcctcttaataccattatatgggggatttggtttcagcatgggaatttgaaggggacacaaacatttagaccatagcacatgtttaatgagtctgaaaagtccttaggaccccctgacctaaaggctgaattagggacattgtctttgggggtgagtagactgcttcaatgtgttcattgttgaactacagggttctaggtggccggagcattgtccagtattaaaagaactttaaaaaggcagtcccttattgatgaggtacttcctgacttcagggacaaagtcactgatggaaccaatccagaaaaagtgttctcattgtccagctcttcttcttgtacagccaaaagactggcagctggtgtttaccttttcccttcaaggcttgggagttagcagctgtataaaaagggcagtcctaatcataaatccaattgcatttgtgcaaaacagtaggggtaacctatcccttccttccttaaatcctagtgcttgcttatcttccttactaagaaatgtcctatgtggattccctgccccctccagaatagagcacttttgtctgcattaaatacctgttcaggtagatatccttcttttctcaatgattttcttaatggtgtctgggaactcgtctgctgcttcttggttggcagatacagcttcccttgttatcttcatatttttaaaacaaatctcttcctaaaattatcaaaccatcctttgctgatattaagttcttcagctttagatccttcaccttcctttattaagttgtcataccatgactttgctttttcttgaatcacattagagtttatagatatgcctttcttataacaattctgtatctacatgaaaagctgcattttcaattcaagataaaaaggtattttgcaaaaagtccaagattttcatgcctgctggcatagctgcagcagtggcttcatgagtctcctctcctctcctctcctttctttcctttttttttttttatcaatggtccttataccggattcatttatcttgaaatgaaaccacagctgcagacctcaatctataatacacaccaagcaatttaactgtttcttgtaatgtcatgacttttttctgcttcttaggagcatttccagcatcactagtggcagtttgtatgggtgtcatgtgttattcaaggtttatgctattgcattaaaacatgttaaaaaaaatacacaggaaacatgagagatcacttttcattgtgacacataatttaccagagttatgacctgctcatgcagagatgagtagcattacatggcattttaagtggatacttttgacacttgagctcactacaatagcaacaggaggtggctatgaaattatagtagtatagtatgtgctacagttaattttgtgcagttataatttaatactgcatgtttgtttataattctctcaactgcagtggtgccatgtttggtcagtaagtatatacataaattttgatgcaatttacctttttataatagctttgtgtaaattttatggtagcaaatcatctaataggcttgtattgacatacattttatgcattcatgacacaagaaaattttttttatatttctaggccacatgaatgaaatgagagaactcatttcagcattaactcaaatgttcatagttcaaagtctcatgtgagacaaggcaagttccttcccccccaggagcctgtaaaatcaaaagcaagttagttgcttgttagctacaatagggatgcaggcattgagtaaatacagccattccaaatgggagaaattggccaaaacaaaggggctacagggcccattcaagtctgaaatctagcagggcagtcaaatcttaaagctccaaaaggatctcctttgacaccatgtctcacatccaggtcacactgatgcaagaagtaggttcccatagtcttggtcagcttcacccctgtggctttgcagggtacagcctccctcctggctgctttcacagcctggtgttgagtgtctatggcttttccaggcacataatgcaagctgtcagtggacctaccattctggggtctggaggatggtggcccttttctcacagctccactaggtggtgccccagtagagactctgtatgggggctcctaccccacattttccttctgcactgccctagcagagattttacatgaggaccccctccatagcaaacttctgcctggacatccaagcatttccatacatctgaaatctaggcacaagttcccaaaccccaattcttggcttctgtgcactcgcagaatcaacaccacatggaagctaccaaagcttgaggcttgcaccctctaagctctgtgttgtgagctctgtgttggcccttttcacccatagctgcagtggctgggatgcagggcaccaagtctctaggctgcacacagcatgaggaccctgggcctggcccaaaaaaacactttttccctctaggcttccaggcctgtgatgggaggggctgctgtgaagacttctgacatgccctggagacattttccccattgtcttggggattaaaattaagctcctcattacttatgcaaatttctgcagctgacttgaatgtctcctcagaaaataggattgtcttttctatcacattgtcaggatgcaaattttccaaacttttatgctctgcttcccttataaaaataaatgcttttaacagcacccaagtcatctcttaaatgctttgctgcttagaaatttcttctgccagataccctaaatcatctctctcaagttcaaagttccacaaatctctagggcaggggcaaaatgctgcccgtctctttgctaaaacatagcaagagtcatctttgctccagttcccaaaaagttccccatttcatctgagaccacctcagcctggaacttattgtacatattactatcagcatttttgtcaaagccattcaacaagtttctaggaagttccaaactttcccacattttcctgtcttctgagctctccaaactgttccaacttttgcgtattacccagttctaaagtcacttccacattctcaagtatcttttcggtaacaccctactcctggtagcaaattactatattagtccattttcctgctgctgataaagacatacatgagactgggcaatttacaaaagaaagagttttactggatttacggttccacgtggctggggaggcctcacaatcatggcagaaggcaaggaggagcaagtcacatcttacatggatggcagcaggtaaagagagagcttgtgcagagaaactcctgtttttaaaaccatcagatctcatgagacccatttaccatcacaagaacagcatgggaaagatccacccccatgattcaatcatctcccactgggtccctcccacaatatgtgggaatgggagctacaaaatgagatttgggtggggacacagagccaaaacatatcagacaagaactgggttgacttcactgctgtagatctaagctacagacaggcaacacagaagggacttatgatttgggctgagaaattgcattagatgatttctacttctttctaacgtaagagaacaattttcctcaccaactgcttatgcaaaaataggcatttttttctaatcttccctcccaatttcagggatcaaacttgatttaacagctatcatgttagagaacttataatcataaccaatagctagtatgtcctgtatcttccctatgtctcaggacctgtgccaaacagtagatcaatcatgtctgagatccttgaatacccagtgatgagcagattttttttaatacataattttttcctgctgttaaatctttgactaaatataaaggcaatgttcatttatttcaataaattcaaccatacaagtataaccagtgtacatttactaatatatctacttttataagtatgttacagtgcaagtaaaaatgtgttaaataatatagcaccattccacatagtttaaagcattttattgcacatactgattttttaattatattggtttctcgcctattcattctaccaaaaccttgtatcatttagttcttatgatggataaaaactgaagtggtcattatgcatttggcaaaacccatagaactgtacaatgcagagtgatttctaatacaaaatgtggactttagttaattacaatggattcatattggttaatcaatcataacaaatgtaccataccaatgcaagatactaataataaaggaaactgcggggaagaggagaagagtatataggattgctatactttttgttcagtttttctgtaaaactaaaactgccctaagaaacaaagtctataaacctaaaaaaaataatgcaaacagattttcataagccctctaattatttacccttgggccattctccaaaggagtctatcatcctgctttcaaaattgtttacaaatatcccatctacagatatatagagatactacagatagaaagaaaaagcttttgttcatctcaggaactgtctaattgtgacattgacatagtctacaattttaactttaccctaccaaatttaatataagacaagatgccacagcacactgggatagttgttctatggttaggaactttatacgtgtttaaattatctgatcccttttacatcatccttctgatccttcttgctagaagtgatactgtcctatcctcaactgctctacatattcaaggatgctcttttggtcaatggaagtagccatctccatttcttgagcgccttccacatgtaatgcaatatgttaggtgctgggatacagatatgtctaaggcagacagagttcctatcttcagcagaggatgcagatattaaccaaattttacaattgaagaaacaagcctgggtttatcacattcataatccacttaacaaatattcattgaatgaacttgactgattaagaaaataactgaggcttagttaagtttttcttttataccacataggaagactgccaaggagaaactagtaccatagacaaagtaatgaatgcatattcaacctgctttaactgaatatctttaaataatttgtataatgatttatttgatgttgtaagtttcaaataactcctaaccacctttaaatttaagaataatattttccctatagttagacagcatttcagctgaccaaatcattattcctggctgcttcatcagagcactgaaggccaaatatatattaacatatgttagatacttaaatggttctcatcaaacctccagatgttcaatcaagagaagaaaagtgcatgaactctctgattgtcctatcagcagggtataggaataaaaatgcatcccatacaggaagaccaaaaggcacatgtttttttctccagctgttttcagctactcaggtgaagctaaaagttagatttacccaggtagggagttgaaggggtagacaagggaattattaaaatgatggaatgaatccaagctgtggaaggaggaaaatgaggagatacgtgagtggggctttctcaaaatagcacttaaagacatcagattactcttcaatattattttctcctcaaaggaggggtccaggaagccaatagagaatataatggggtttctaaccaagaggggataatgggaggattgtttcccacctccagccttagctgtctctgtctcactaccactttaacctcctttattaacaacacacgtctgaatcctgtagcttagagtccactgtgagaacagagccttttcagcttctcctggattgatcaatacacctttcacttaaattctcttttgaccttcaaaggtaacctttattggtgacttgtactcttgcttgtgttaaggatgtcaaattgctagatttaatcattatgtcatttctatctatttctgtctggctgaagactaatttcctaattccaaagttgagaagcaggttcttgtttctatcatcagaatgggtccttaagttggaaactagactcgacagatacgagtaaaacaaaaactaagtgttggttttattcccacatttcccctgacccaattagaatgaaagggaatagatctcaccagtcacagttatggcatgtgctgatggtcaagaggaaagcgggcaacacctggcaacccacctgtcccggaagtcctgcccaacactgtcacatcaaaaggacaaaacttagtcttgtggccacatccagctgcaatagcataacgaaggtcagcagaggggagcattttacctggagggctaacaggcaatggatagcaaagtcatcagtaggtttagcaacacatctattcagacggtgaaacatttttgtctacttagcttcaaggtgcattaaaatcatccagagatccttatattcatatctatcatcacccctaaatgaaagacaaacccatgagctaccactgtgtcaagtttctgtatatacgtacgaccagctctcttcctcaccagctccccctttactctaaacttcaagcttccacaaaatagataccatttcatttcctttctgcatctgaaatacatgagcttactcaagaaaagtttgatcaatgaataaatggatgaatatcagtgactgaataatcaaactggatggctgaattgaagggaagaaaggaatgaataatgtgttctaagcatcaatttggtctgctggctgcttttgatttttaaatcagtttatttaacttttagttgtttcttgtctcatatgttttatccattgggaaaataaaagttagttaaaagtctcaatgatttagaattggtgcgtgaaagtcagatgccttaggaaaatgtataaatctcctctccaaagggcccagtggatgtacatatgaaagtagtttgtctctttatcttcaaaaattttttactatgtgttcacaagcagaggatagagaaatgcttccaggcaagttaaacaaacagggatctttatcgctcagctgcctaccatctatcttaaacatttagcatgggactataaaaagatcccataccttgcctctttcatagatgtacactgtatcaataataccattgggtgattagtaacaataactaataatttagaattttagatttgttatctcacatgtaaaattacatgtgagatgcatgtaatttacatgtacaatatgctaccttttcagggaaaatcatgggcatatcaataattttttaatgagattatgacccttccttaggtaatagaaactgggttaatagcaaatggggtattgataatctctattaataatagcaactggggtattgataatctttagttttctgacatgcggcacggggtaatactatagaaagcagacataaatttcacttcctaagtgttaagtgcttagccaaccactctaaaaatactctattataataatgagtaaatacaggaaataaaatcatattttatgtttaaatgggagccaggagataaggaactaggttgactttgcatccactttgcatttgagactacagattcaacatgtgatggaggaagagtagcacctagtggtgaaacgcagcagctacacccaccagggagctgactggaagtcttccaagtacttcatcctcatttgttgaaacgtcatttgtggcattttaaatgctgcatctttgattcctgagataggtgttttagtgtgtctattaaagatttggagtcagctttatgtgcttgaatatttccaaagaaaaatgtatacatgatcaatatatccaggaatttgtgaaaagatcctaaacttttcaaacatgtcacaggtagtacttgaagtatgcttggtaaaatgtaccggttaaagcagtatgtttctcagatagcctgagattttatttaacaattatgtatctaagtctactaatacatttgagcaaaagagtgttgggttcataaataagaagtcagtatttcacttagattatttcagaaacttgtaagtacctgtaaatagctactctgaaattcccttttcttcaagtgagagatgccgtaagtataacacagtgttttataaacttggacctgcagtaaataaataagcactaaaaacttttatagtggaaactagtttcaattatatagctaatagtttagttgatgttgatagtggtaagaaggaacaaattttttaaaaactatgaataacctttagtgtatatttcaactcctaaattaaatgtcaattcaactaaaatgttactctcttagtgggggtgtaaatgagtgtatcgtctgtccttgagactttgatgtaaaaagacagagttgtgaaattcaaattgcaccaataatcattttgtttttatttcccatgctcctttatctattagcagacatcccacatgcacacacacctaggccaggcccaggccaatcactgtatcccaccccttggctcttgggattattccaaggttgctcaaccaaagtgcagcttccagcaatgctatctttaccagaactggcagggaagtcccttctttcccctttggtgggcggcggttaggggtgatgctcattctctgcagcaataagtgtgtaataacaaggtccctaaccttctggttcctgttgctcttccccagtgttctccccataagcctccttaagataaaatctactttgagatatgtttttgcagcctaaagaggactgactcatgttgcatttttaaaataaggcatagttctgatcatgctataatatcaccctggtcagaaaatcctcattgctctccattgcttaaaaaataatccccaaactctttttggatgtgttgtttggctctaaactccttttccagcctaatttcactcaacctagtgaaactgaattattctttatttcttcaaaacacccagtactttcccttattcattctgccctataaaaattattttctgcctccagccatgccagtttccaccttctgaaactataggtacttttcaagatcaactacaaataattcatcttccataaatccttcttcattatgccatgaatcagttaaggttgggttcaactgactataaatgaaaactgaaaatcacaatggcttaaagaagtgagaaatttaattcttgcctatataaaagaagcttgggggcaggcattcctggactgtcatggcaacaacatgaatacggatgtattagttttctatgctgcataacaacttagtacaaacctaacagcttaaaaaacagttttttatctcacagtttccataggtcaagattctgcatatggcttagttaggtggtctcacaaggctaaaatcaaggtgtttaatggactgcattctcatctagaaactagggaagaatctgcttccaggatctctcaggctgttggcagaatttatttccttgcagctgtaaaattcgtgtggtcttgtttcttcaaaggtagcaacagagaaaaggagtctctgctgcttacagcctctgatttcagagaaggtgtcagtgctcttttaaatggctcacctgattagctcaggcttacccaggataatttctcttttgaggaactcaaagtcaactgcttaggaactttaattacagctgcaaaattccttcacctttgcaaataatgtaacctaatcatgggactggtttcacatctcctttgccatattctatcaactagaagtaagtcatagttttcatcccaactcaacaaaaggggattatacaagattgtgattcagtagggggtcaccttcatgtgcgtccacatgatcagagacccgagtcctcttttcctgctttactctatcactagcctccatcctcaagttcccctcatggtccaggaaggcttttaaagccctaaccatcatattcacctaacatgctgcagtaaggaggaaagaaatagggtgagaaggattattcttcctaactgggtcagttgcctgtaagcaaacttcacggaagtcccacacatgttcactaaatctctttagcctcaggtgcagacaataacgagacatattacctgtagataagttattaagaagtaatacaactaactaaaagtcagtctacctttcattgtcactacctgccagcaattctcaataattcaatcataaaatacagtcagttatgtgtcagttaatgacagggatacgtcctcaccttctttcaaatgtgcaggttctcacctcctttcaaataagcagaagagtgagatagacgaaaaaaaaaaaaaaaatcccagaaattcttttctcagaattacacaagttggaactccattctggatcctcttaacagatcacatactctctcccaaatccaataacggaatgtttatttaatggattatcagcactccctatcccacaaagatgtcatatcttcatcagatctttttgtctgggcactatgcggctcccttctacttctgggtgtgctaaggtccacccatttcaaagtcaataccaccgagaaacttccaggagaggccagagtgatggatatcgtggtatctgtgtgtaattttacataattctattttccccaaactcccctccccaactgggaaggagtcaggagcagaaactacctgtgctccctggactgttgttgggcccccacccatcacttcttccctgcagagggggagtaaagaaagatccagggacactggcggtgacaaggatgggatcaatacatgtgaacatgcttatatgcaatacttaatcattgtattgtgtgagaaaacatggatagtgtttcacaattaaatagtgtctatattttaaatccatattcatagaaatggaatgccagctattaaataactttttaacaaatgttatttcttaataatattaatgaatcttattactaaattgcattcaattagtcatttaagtaacacttatcaaatatatgaataatatatcttgagtacatattatttattaataatacattaatttgattttaaaattaagcatcaaacctccaatatgttaaatataaatcattaagtcaaatacaaatagagaaagggtacggaggaggagagtatattctggagctcacatttaaaatagtgaggatatgtcatggatattaactccaaacctcacagcctttccccacagggggaggacaagttgcctgcaaagcttccctcccaacgctgtgccgtgatccaccatagcttgcctactttcgccatttaccagccctttctacaggcctggcaggaggagcctgcacctctgcgtgtttgctgcgtgctgcttctttgcgttgctgacccacctccaagttctctgggccaggagatacagtccaggttgaccacaacagagaacagctaagccatgtgaaagtagaggacaaagaccctggtggctctgcctcggggtctccctgttccttccagaatctctcacagtgggtcgctgtgtcattcaaaaatgtcactggggtgctcgccagattcaccctttcagaggcccctaaagactaagtctgtaagtgagtctggggcggagatgctcctgagactacagtttcggaaactgacctttcaaagagcctgagtctgagaaagttgtaataccacagagtaaaatcatgctttaatggtgggtttaggtcatttgatataaaaaaccaatttttaaaaaatgtaacacagaaataagtgggaaaggcaaggaggaaagcttcagaggccattcagggagactggggtggggacgtccatggataaaacagccagtgaactgcagccctagaaggaaatgcaagaggcacacacaaaaccagaggctgcaacagcaacatggaagttaaaatggtttactccacaagaacaagaaaccctggccgggcgcggtggctcacgcctgtaatcccagcactttgggaggccgaggcgagtggatcacaaggtcaggagatccagaccatcctggctaacacggtgaaaccccgtctctactaaaaaatacaaaaaattagccgggcgtggtggcagatgcctgcagtcccagctacctgggaggctgaggcaggagaatggcgtgaacccgggaggcggagcttgcagtgagccgagatcacgccactgcactccagcctgggggacagagcgagactccgtctcaaaaaaaaaaaaaaaaaagaaaccctgaggaagtaaaatcagcttgggaaaattatgacaatggctccatgaaaccaaatgaaagaggagctcaaagaataaattatagcccaaaatgtttaagcacacagaattttttaatgtactcttcaacaccccttctctctctctctctctctctctctctcacacacacacacacacacacacacacacacacatttttctacatcaacagtaaccatcaagggcatcagagagctctccaagtggatgttctttctcctttaggggacaaattgtaaaattgacgtctgactaccccaggctaagatgctgagtctgcactcagtccagctatgaacctccctgattttctccctagttccatcttttttctgcttccccagctggtaacccctcctctttgtgtcccatttgctattccctttcttctgtgactgcagactttccctctctactggcttcttctggggctataaatgtattcaaggtctcccttatttaaaaataccctcaggccagatgcaggcttacacctataatctcagcactttggaggccaaggtgggagaataacttgaggccaagagttgaagaccagcatgggcaacatagcaagaccctgtctctatttcctttattttttttaaggagacagagagaccaagaaataccttcaagtgcctccacatctccgtctattgcatttcacaatgaactccctgaataatcacatgcaaactgtcccctctaccgtgtcactctgctccctcttcatcactgcaggctagctcctgcccccttaactgtgctgaaatgctttgacaaaggcctcctcattgacaaatctaatgtcttctttttagtcctcagcttccctcaaactctttgtgacatgctactctgttgatcattctgtgtttttgaaactttttcttcctttggcttctgagaaaaccctcataattctgctgtctcacttatgttccttctcaaattcttctgctggttaaatgttggtattccccagggctctgtattcatgtgagtctatccctggggctcaaactgtggtctccaaaccagcaacatccttattaccagggaacttgttagaaatgcaatttaagaaatacaggacagccagttaaatgtgaatatcagaaaagcagtggatacattttacaattttaaaaattaggccaggtgcagtggttcatgcctgtaatcccagcactttgggaggacaaggtgggtggatcacttgaacccaggagtttgagaccagttgggcaacatggtgaaaccctgtctctacttaaaaaaaaaattacaaaaattagctgggtatggtggcacacgcctgtagtcccagctacttgtaaggctgaggtgggaggatcacctgagcccaggagacagaggttgcagtgagccaagatcacgccactgccctacagcctgggtggcaaagtgagaccctgtctcaaaaaaaaaaaataattatgataagtatgtcccatgcaatatttgggacatatttattcttttttaaaaaaaagtgttattaatctgaaattcaaataattgggcatcttttatttttatttgctaaatctggcaaccctaactacaaattactagtccctttcccagacctactgagtcaaaattctaagcatctggcctataatttgtgttgtaataagtcctccaggtgattctaatttctcaagttcaaggagatgctctacatcccacccttgactgccttcatctgctcccatgacaacacttaaccaaagtggggatgttcctgaaccgctgatttgcatgctcctgaattttatttaaccatgtgtcccacttttatgaggaaaaccaggaagaatgcaagaacaaggtcatcaagttctgggctttagaacaatgtttacctgtctttgtataagagatttagaaaaagattcagtgatggagaatccatttttttctgctcctgcctacccactcatgtaatgcttctaacctatcagagaattagggaaaaataattagtcactggaattaggcttcctgcacccattcccatcccctcaatctctctaagagaagatgatagaggtgccccatataattcttagggtcttacagtagaggaaccagtgcccctcaatctatctggagttcctctgagccattaggagagtagagatggaatggtgggaagcaaaagcagatggaattgggcagcttcacagagagttctcatcagcccccaaaggacaggagcatagataggacttagagaactggcgggctcaaaagggtcccacagtcatgacaagggaggcagccacactgtggcctgtgcaacagagaccagatggatgatggacacctccatgggagccagtctgaagggcaggcagtacccaagatcagacaagtctacacatcagccaatggcagcacaagatgccctcagacaagagcccattcccaccacattgcgactctcaggagattcagaacagaaaggaaatttatatgacaaatgattaacatgatttagctgacttggaagggattacattaagcttcctgcccatgaagcagaatgagaggttcagtcagttacaggatgtatccttaagggtaaacaaagtcagctgctgcaacacaccctgaaatcttagtggctgaaaccaagttaatttctcactcacacaaagttcagtcaagaatcagccaccctcctcctttgcctctggaacacgtggcctcctcaggcacagaggcaggggaagaaagggaaggaggctgcacaccaattcttcaccctgttaacctggaagggacgcttctgctcctaggccatcagccagacctagtcacatggccccagtctcactagaaagaaggcaggagatacagaacaacacttggatatttggtgtcttagtcagctttggctgctgtaacaaaatagcatgaactgggtggatcaaacaacagaaacttattacctcccaaaggctctacctccaaataccatcacattggggtttacagtttcaatacataaattttaaagggacacacacacattcattccctaacatttggcaaacattgactatctctgccataaagcaaatcaattaaagttactttcatcacacattcacattcaaggtgatctctatgctgatagttcccaaatctctatctccatccccaatccggactcctgatccatatacccacctgcctccaggatatcttcactttcacatcctataggtatttaaactttattttttaaaatgtcaacttttattttagacttggaggtacacgtacagatttgttacacaggtatattccaggatgctgaagtttgaggtacaattgatcccatcacccaggcagtttaatatgtctaaagctaaacctatcctcttcccccaacactgttcctcctcttgtatttcttatctctagacacccacaacagaaacctggagtaaccctggactatgctctcctctacccttttacattctatcggtcaccaagtttagtagattctgcttcctaactgcccttatacctgtttcttctttccatctgcttcgaggcttctcagtcttggcactattgacattccaggccagataactctttgctgtgagtgccaccctgtgcatcgtaggctgtttagcagcattactgacctagtagatgctaaggttgccctcgcgaaacaaaaagttttccaacattgtcaaatatcccctgggagacaaagctgcaggcctccaattaaaaaattactgatctgttactgtttaattttccattctcgttgtttcaggcctgagttgttttaatagttgttgggttgtatttttcttttctttctttttttttttttttttagatgggatctcactctgtcacccaggctggagtgcagtggcacgatcttggctcactgcaacctctgcttcccaggttcaagtgattctcctgcctcagcctccaaagtagctgggattacaggcacgtgccaccatgtccagctaatttttgtatttttagtagagaaggcgttttaccacattgtccaggctggtctcaaattcctgacctcaagtgatccacccaccccagcctcccaaagtgctaggattgtaggcatgagccactgtgcccggcccattgggttgtattataattggcatccctgccaaaacattgcacagcccacccactcacctcccactctactccctgaacccattgtctgcactgctacctgaatgatctttgtggttaatctgaccatttcactctcccattaaaagccccctttgcttataggataaagtgtaaactgcttatgaagccatacagagttctccatgaacctgacttaaccaatttcactgcacatcctgccaccactatcctctacttgtaatgcaggaacatattttggccatttatggcttggttcaagctcataacctcctgtgtgaagtcattcctaaacctctgtgaagagctgattactctcttctctgtggctctaccatggccttggtagacttctggaagacttgggtttttgtatggctacctgtactaaattgcaaggtttttagggatgaaaccaggtctgcttgattcctgtgtttctcgtcattaagacaaccctgacacatagtaaccacccaattcattttttaacaaatgacagaagtgcaacagtcattccctcaggaacttttgattctgcaaaaaggcttggacagtaaattgggctgcagcaattgcctattcttcactgaagaaaagtcttaaggacttaactctgaaattttggaagacaaagtagccttaattaaaatagcacctttcaggccaggcatggtggctcacacctgtaatccgagcactttgggaagccaaggtgtgaggatcacttgagatcaggagtttgagaccagcctggccaacctggtgaaactccatctctactaaaaagatacaaaaactagccaggcgtggtggcaggcccctgtaatcccagctacttggaaggctgaggcaggagaatcatttgaacccaggaggtggaggttgcagtgaaccaagactgcaacactgcactctagcctgggtgacacaacaagactctgcctgaaaaaaaataaataaataaaataaaatagcacctttcaaatgcttataaatcacaagatcaaatcagttgaaagcaatactttctttttactcattacagtttattgagcacacactaagtgctcagaactgtgtcaggtgctatacagattataaccctttaaactgtgagaattaccaataaaacatgaaagagtgaaagagctggattgcaattaactttaccaataattattatggtgtaattctaggtgcgtcattgttatatggaaataaaaatctcaacagtgagtgaaggctgctaaaagtagcagcagcaattaagcctcatatgactatataactttagaatgaaaatgtcagggaggagaaatggaaaaatcatgcaatcaagagagacacgttttataaaataataaaggacaggacctctttttaaatgcttgatggcaaacacgtgtcacaagttagaaaaatgttcactgtatttgttgaatgttttccatatgtcacacatatggattttctaattctatgagagggttttcacttaaaaattccagtgtgttgacaagttaataagtgatctactgacttcttcccacgcaaggggctggaaaaccaatttcggcatagtaggtggcattgctttccctgggttctcagccagggtccatctggctacaacagaggtgaggcagcctccccagtcctgctgcatgccacctctcagcccacctgccagctaccaccccgctcaggtcccctgtttccagccctgccaaaccgcccacctcaccctgaaaattccctctgccaacaaagtccttttcccctgtgctgtacctagcccatgtctactcatccttttctctgaaggtcttaatgaaatgtcatctctcctgtgaagcctacttgggtctcccaagcagaatctgtaatccctggttcactggctccttggtacttaatcaattccccgtgtcatgccacactaaccgtttctattcatttagctatttcaataaatacatttatttcaaaagcttatttattgagcatctgctggatcagacatggtgcccaaccctagaaatagaaagatgaatggtgcatggggtctgctagagacctaggcatccaaatacaagaagcacaaagaacacccaggaaatttatcgcaaaaagatcttcccctaggcacattgtcatcaggttatccaaagttacgacaaaagaaagaatcttaaaagctgtgagacagaagcaccaggtaacctacaaaggaaaacctatcagattaacagcagatttctcagcagaacctctacaagctagaagggatttgggccctatcttcagaaattcaaagaatatggctcctagttttccagtatggatggggtcccatatagattgactgtgcaggataagacaaaagtcaaatatggctcctagtttttcagcatggatagggtcccatgtaagatatggactacataggagaagtgaatttaggaagaaagttgatgcattcagtatacttcacatagagcactggatgcgtatggacatttgggtaaagatatctaagaggcaactgaacgtctgagcctgaaagttggggatgcagaatgagctaaggagacagatctgcaagttgtctgcccctgactggtaatcagggaccatgagaccttcagagaacccctggagagggctcaacgtgggaagaaagcctaggcagagctctggagaacaccaggtaaaacggcctggcagaggaaaaggagtcatggaggacactgagaagcacagttagagaggatgaaggagaaccaggaggacacgatgtgattcggtacaaaggaaagatattacaggaaagaggaaggatagtgctaagattaagggcatagcttctgaagtcagaccacctccatgctggtctagcacttaataattgggtgaaatagagcaaagtattcttttacgctttatacctcagttttctcatctgtaaatgggtatcttataggactattgttaatattaaaaacatttagactagcacctgccatgtattatgttcttaataaatatcattttttattaatattatagatttctctcttccatttttgtcaacttccccaagggcagagactactttttttgagacaagttctcactctgtcacccagggtggaatgcagtggtgcaattatggcttactgcagcctcaaccttctgggctcaagtgatcttcccatcttggcctttctagtagctgggactacaagtgtataccaccatgcccaactaaattttttaaattattttttgtagagacagggtctcactatgttgcccaggctgctctcaaactagggctcaagcaattctcccacctcaacatcctaagttgttgggattataggcatgagccaccacacccagccacagagaccactttttaaaaatcttctttgtatctcattcacctaccacagcatataactcataataggcacaaaggaaatagttgttgaataaaatcactctactaggaccctctacgtggccagagcatcttttgtcataatagttagtcagagatttgacccacggagtcaacgttctgagaaaaaagtttgtttttctccaaagtcagaaaagtctattttggttgtttccaaagacatttaatgtgcttaaaaaatcctagagttgaagagactttaaaagttatccagtccaatgtccttattaatgcaagaaactttatatgacatccataaaactcaacttccaatgacagccaacccactcccagcccatttctctgttagaaggttttattttattcttagatcttgaacacaaggcggcctccctgcaatttttaccaactgatcctaattcaatcttatagagctacccagcctacttctatacccctgagaagataacaatccttcaagaaactgaagacaactacaggcatcccttattttattggaagaaggtaccacctaggactttcacagctagagaagagaagtaaatgcctggctccaaagcttcaaagaacaggcagagcctcctgttaggggctaatgcagcttgacttgaagttgaagtcaacgcacattgaccattctgaaaatctagagcctttaagaatggcgctaaatctactctacctgtgctctataaatggaacagagcctggatgacagcacctgtgtacagcatggtttactgaatgttttaagaccactgttgagacccagtgttcagaaaaagattactttcaaaatattactgctcagagacaatgcacctgatcacttaagagtgccgatgcagacatataaggaaattaatgttcttttcatgcctgttaatataacatctgttctgcagcccaaggatcaaggacaaatttttaactttcgagtcttattatttaagaaatacatttcatatggttattgctgccatagatattgatttctctgacggatctgggcaaagtaaattgaaacccttctggaaaggattcactattctagatgccattaagaacattcatgactcatgggaggagatcaaaatatcaacatgaataggagtctggaagaagttgattccaatgctcatggatgacttggagaggttccagacttcagtgtaagaagtaactgcagatgtgacagaaatagcaagagacagcaattccaagagcaattccacagaccctctaaagaaaggagactgctcctgtaggacccaggtgaaccctcaaaactgtgagtgccccaactgtggaagttgggaaagggagaccctcctctcctaaacacacacccccactggaaaagctgaaggtctgtttgtgggagaagtttctgactttatctggagctgagtcaatgtggagagccaagtgaaatacaggggtagaggaagcagcagaaaggccctgggagcttgctgggtgccttagcaggctactcctgcctggcacctcagggatccagcgggagaggagcagggggtaaaactacacaggaagaagcaaatctctagctgaacttagtaacaatttgaacagggtgagaagcctcctggccagaaccagggggagggtgcaaatccagtatgcagactctacaggcctgggaaaaatccagaccttttatttcgcaactaggaggcgagtagcctggggcaggttttcaagctggtattgctctctgcctggaaacagtctgggggctgataagggacacgcagggagtgagaccagcccttcggtttgcatgggagctgggtgaggcctgtgactgccggctttcccccacttccctgacaacctgcatgactcagcagaggcagccataatcctcccacgtacacaactccagtgacctgggactctcactcccatccgccacagcagccgcagcaagacccacccaaggagagtctgagctcagacatgcctagccctgcccccacctgatggtccttccctacccactctggtagccgaagacaaaaggcatataatcttggaagttctagggccccgtccactgccggttcttccccgtaataccacagctgatgctgtctggaaagcaccacctcctagcaggaggccaaccagcacaaaaatagagcattaaaccaccaaagctaagaacactcacagagtccattgtactccctaccacctccacaggaacaggtgttggtatccatggctgagagatccatagacagttcacatcatgggagtctgtgcagacaacccccagtaccagcccagagccaggtagacttgctgggtggctagacccagaagagagacaacaatcactgcagttcagctcactggaagccacatccataggaaaaggcggagagtactacatcaagggaacatcctatgggacaaaagaatatgaacaacagccttcagtgctagaccttccttctgacagagcctacccaaatgagaaggaaccagaaaaccaaccctggtaatatgacaaaacaaggctcttcaacacccccccaaaaatcacactagttcaccagcaatggatccaaaccaagaaaaaaatccctgatttacctgaaaaagaattcaggaggatagttattaagctaattagggagggaccagagaaggtgaagcccaatgcaaggcaatacaaaatatggtaccagaagtgaaggaagaaatgttcaaggaaatagactgcttaaagaaaatacagtaaaaaattcaggaaagtttggacacacttttagaaatgcaaagtgctctggaaagtctcagtaatagaattgaacaagtaaaagaaattcagagcttgaagacaaggtcttcaaattaacccattccaacaaagacaaagaaaaaagaataagaaaatatgaacaaagcctccaagaagtctgggattatgttaaacgaccaaacctaagaataattggtgtatctgaggaagaagagaatcctaaaagcttggaaaacatatttgggggaataatcaaggaaaacctccccagccttgctagaggcctagacatccaaaaacaagaagcacaaagaacaccaaggaaattcatcacaaaaagatcttcccctaggcacattgtcatcaggttatccaaagttaagacaaaagaaagaatcttaagagctatgagacagaagcaccaggtaacctataaaggaaaacctatcagattaacagcagatttctcagcagaaaccctacaggctagaagggatttgggccctatcttcagcctcctcaaacaaaacaattatcagccaagaattttgtaaatccagcaaaactaagcatcatagatgaaggaaagagacagtctttcagacaaacaaatgctgagagaattcaccattaccaagccacctctataagaactgctaaaaggagctctaaatcttgaaacaaatcctgaaaacacatcaaaacagaacctcattaaagcataaatcggacaggacctataaaataaaaatataagttaaaaagcaaaaacaaaaaacaaaaaaaccaaagtacacaggcaacaaagagcatgatgaatgcaacagtacctcaggtttcaatactaacattgaatgtaaatggcctaaatgctccacttaaaagatgcagaaccgcaaaatggataagaactcagcacagcaaaaggaacagtcagcagagtaaacagacaacccacagagtgggagaaaatctttacaatctatacatctgacaaaggactaatatccagaatctacaataaactcaaacaaatcagtaagaaaaaaaacaaacaatcccatcaaaaagtaggctaaggacatgaaaagaagatacacaaatggccaagaaacgtgaaaaaaatgttcaacatcactaatgatcagggaaatgcaagtcaaaaccacaatgaggtactacctcactcctataagaatggccataatcaaaaaatcaaaaaacagtagatgctggcatggatgcggtaaacagggaacacttctacactgctggtgggaatgtaaactagtacagccattatggaaaacagtatggagattccttaaagaactaaaagtagaactaccatttgatccagcaatcccactgttggctatctacccagaggaaaggaagtcattactcaaaaaagatacttgcacacacatttacaacagtgcaattcacaattgcaaaattgtggaacgaacccaaatgcccatcaatcaagtggataaagaaactgtggtatatacctatatggtggaatactatgcagccataaaaaggaatgaattaatagcatttgcagtgacctggatgagattggagagtattattctaagtgaagtaactcaggaatggcaaaccacacatcatatgttctcattgatatgtgggagctaagatatggggacgcaaaggcataagaatgatgcaatgactttggggacttgggggaaagagtgggaggagggtcagggctagaagactacaaatatggtacagtgtatactgctcgggtgatgggtgcatcaaattctcacaaatcaccactaaagaaattactcatgtaaccaaataccacctgtaccccaattacttatggaaaatttttttttaaaaaagaaatagccagagaactagaattataagtggagcctgaagatgtgactgaattgctgcagtcccatgataaaactttagcagataaggagttgcttcttagagatgaataacgaaagtagtttcttaagatacaacctactcctggtgaagatgccatgagcattgttgaaatgacaagggatttagggatttagaatattccataattttagttgataaagcaatggtaggcttcgagaggattaactccaattttgaaagacgttcaaccatgagtaaaatgctgtctaacagcatcacatgctacaggcaaatcttttgtgaaagaaagtcagttgatataacaagcttcatttttgtcttaagaaattgccacagtcacctcaaccttcaacagccaccaccctgatcagtcagcagccatcgacactgtggcaagtccctccaccagaaaaaatattacacttactgaaggtccaggtgaatgttagcattttttaggaataaggtatttctgaattaaggtatgtacacttttttagacataatgctattgcacacttaatagactacagtatactgtaaacataacttttttatttttttgagacagggtctcactctgtcacccaggctggagtccagtggtgcaatctcggctcactgcaatctccacctcctggactcaagtgattctcccacttcagcctcctgagagctgggattacaggtgcacaccaccaccacatccgacaaatttttctattttttataaagacaaggttttgctatattgctgaggctgttctcaaactcctgacctcaggctatctgccagcctcagcctcctaaagtgctgggattacaggaatgagccactacatttggccaaacatagcttttatatgcactggaaagccaaaaaatttgtgtgactcacttcattgtgatatttgctttatgccagtgatatggaactgacccagcaatatctctgaggtaggcttatacattctaggtttttaaaaaattaacaggacaaaaatcaacactgtatcagctggtgctgtcattttaaaaataccatagactgggtgacttatataaccgaaatttattgctcacagttctggaggctgggaagtccaagatcaaggtgctattagaatgagccaattctgatgcaagtggatggagcaaatacagtcttaaggctcaatattatgagtatatacttcagagtatcaaccctctgagctctgtaccggtctgcactaggtggggacattcacagcctagcttgcccagaaacagataatcaggactactggaggtttggaaagtgtggcattcatgtaaagaaagttacagcaacaagttaagaagccctgccacacttctggtttgtgaacaaccagcattcaagagtgcacacctatgccttacaggacatctctgaacgcaagttgttaaactattcaaatatatgtcttggttttagtgtagctcttcagcctgtcaagaccacttaagatagtataatttgatctgagattgaccatctcagctatctgttttagcttagtatcatctatacatctgagtgaaatgtctcctacagcttcatccaaagctctggaacaacatagcagcatcactggttatctagcccaggaaaaatcacctcacctctttgatcctccatgtatttccctataaaatttggttaggtagtctttaaagctaagtacaaaacagcagtttgcataaaactttaagaagcctccctatgaagtacacaatatactatcaccaggatttttactgaaattcactaacatgaaattatatgcccaattttgtctgaatgggcattttctaaagaaaagatctatagttttcatgagattcttaaaagggtccaagggaccactattccatgaagatggttgttcaagtagctagctgcccacctcactgcactattttaacacattcctctacctctatcatgaaaatgaaaatattgaagcagtctactattttcataaagtaactgtgaattctcctcaaacttcctaaaacccatgagcttcctcccaactcaggaagcagctatggttttctatgtctgctgcccttcagaagggttgccatagcagaatagaaaaaaactaaagactcaagatcccagaattttagtattaaagcctttgaaaatgtaggctgccggactcaaggcctgaagtatatgccttaaccactggatatagatgtctaccaaatcaaagacaagtgcagttccatcccaaaaatagacaaggattctgccagtaagggggagtcagaggaagagaagagctgagatattaaggtatctctgaaatggagtcccactcctgtccccatcactggtgggagagggtgaataatagaaactccaaatgggtttggggacatctgttaacactgaaaacattccagcaagatccacagagatatcccacatccagagtggaaacagtagaagaatcatcaatgtgtgggcacctgggcagacaagcctaaaacatcatcagggcctccaaaatccagtgaggcaaaggaagagttcatggtattccccatgagcccaggagggatgggtaaataacagaaaaagagcaaaacccatgaggcctctgacttggtatgaggctgacacagcacaaacaccagagaccaggggccagaaggagcaaaggtgtgtctatcaaagccaggttagatagatgttgccaacctaaggcctgacacttgatgtcccctacccgatgacttgagatgacataagtgtcctccccctccccacaatgtacaggaaggtgaaggacagggagatcctgggaccaactaagatttagtatttgccattcagcagaatggagattcagtgagaaaatgtgttcagttacagaaattctacaaaagatacacttcttaaatactcaagtttatgggtagagacgtatatctgcaacagaaatcatgacaaacgatgacaaatgttctactaaaatcacatagcaccgtgctcgtgtctatggcattacccaggtccatacagtcaaagcagcttttcaagaaggaagtgtgacaactctgacggtggtgacccttttctcctgctaaccagtgctgatttagaccaagtgttcactcttccacctgatgagccaggtatggcctgccaggttcttgtttgactgaagcagtccattgtcaacaaaagcccttaaaattttcagacccatcttatcccttccatgttttatggtgctaaagtctgctgtcttaactagtcttttgaagcacttgaggaaattcaatgcttctttttgaggcaaatattgatcctacccacgggatatgggtatatcctattcaactgatgtatgacaaaagatagacatcaggctcttgaacattttgacaattctgcattattctggaaggattgggtggatggattcttctgcagtgaaacagcatagaacatagatactaagatccaagttggaaaaaaatccaatgacaaatcggtttaattccagcctttgccaaaggctcctgtgagacttccaatatttaagggagtcctcagggtcatgatactagagtatccattgcccctcttccagatattgcccccagccatgggttacatagcagaaagcaagaatctggcttatatcatctaagctcccagcagaaatgacttcccttaatcaggatttttattctctgtaacttttatatatgatttatacgaaaaatatccctttaaacaatgttcctgtgacttttgcaagacccgagttagttactgcctgttaaattgtcccttctgtaaagagccagttgataaattacttcgtgattcagagcaagaaaagcttgagttcctgaaagtgtttgtctctgtcctgctgtcaaacaataaaaattacataactcaaagatttccttgtttgccttatctttaggaaactcagaaataattattgtgctctcctgcagtaattgatttatctcaaggacattgtgacattgatttctctgctatattaatttgtctctggtttaaattgtgtattgtgttcgattttgtaaacagcctcaagcttttctgaaaataagtggaatatcattgaaagaaatgcattttaacttccccgagatttggttttcttcaaaatatctacctcagttttatggttatatgaattcacctatttgactaatttctgtcacctctattagaatgtaagttctatgagggacaagagtacatcaaatttgctcactgttctaccttcagtgcctagcaccatgcttgagggttagggtgctacagtaactaacaacctgaaaacttccccatggcttaaagaacaaaggcttctttttttcttgctcactctacatatccactatagaggttggctgtgactttacctctcataaccactggaatgttgtcctgtcctggcaaagagaaaagagatatgacaaaccacaaatcatctattagcactgcattggccaaaccccagtcacacggccaggaagggaatgggtagccctcccagggacaggtactgcagggagggtttggaatatctggagacaataatgcatctataacgtataacataacctgagcaattaagtcaactggacttacagattacattttcctaaattaatgcggtgctctttaattatttcttcccatatttcacctttggtctttgaaacttgttttagaaaaaaagttcacttcaaagtatcctgttgtactatcaacttcgttatacctaggtcaaatacacatgatcatgcataatatctctccccttccccctgaatagcttaggaagtctagagagcagggtattaacttttcccactccagtatactcacagaggcctcagtgaatagttacagagcccatgtcagggtttccatctcctactatagggaagagcagatcaactgataatctgtcgttggatttttttcaacctggatcttaatatctatgttctatgctgtttacactgcagaagaatccatccatctaattcttccagaagaatgcagaattgggaatatgttcaagagcctgatttgaagtttgaaacttcacttgaacactttgaaacttcacttgaacactttgaaacacctgaaaaccccaaacaaaataaaatattcttttgaatgtatgcctaagcttggaagaaaataagagaactgcaggggccaaagacaatgagatggaaactatagcaggcagctagagaacaaaaagtgcaacagtcacgctggtgaaaggctttccggtttgatgctaacattacaaacctgaggctgaggttttaatggcttcataaaagcagaagaccccacttaacttggggagttacactgaggccccaaataaagctataatccacaaaggacctcagcctaagtaaaaggtatacccagacttgccagatttagcaaataaaaatataggctggccagttaaattggaattacaaatgaacttttaatataagtgtgtccaatgcattatctggaacatacttctcctagaaatttttgttgctgtttatctgaaatttaaatttaactggacaccctgtatttttatctggctgtcctagagacactagaaaaattacccaccaaccagcacaaggagtcaacaagaatgcttgcctatctccatgtggactctcagtagtgggggacaggtgggagggaaaaatatcctcccttaaaaatgaataatcatgggtctgccttacacagatttatggttcaactttatactgcatgagcctcatctaccaggacagaaattagcctaacaaaggcccaccagaccatgatacctcagcattccaaagataagctcacaactcaaaattgcagttgggtcgcttatgtactacaagcaaagcaggctccttcacttgtcagtttaaaaattcaaactgcacaaaggctttgagacacgtctacagaatcaaacaagctgattccttctctgtattctcgtaggtagggcaaatcaaaaggttcgatcctgtggcttcacgctgtgattctcatttggccaaaaacacagctgagaaaaaaaaaaaagaaaaggaaaaaacaagccagttctagcattggaaatgtagcattcattaatccattaagaataaaaaggaatgagatcatgtcctttgcagggacatggatgaagctggaagccatcatccttggcaaactaacacaggaacagaaaaccaaacaccgcatgttctcactcataagtgggagttgaacaaagagaacacatggacacagagaggggaataacacacactgggacctgttgtggccggggcagggagggggcgcgatgggagggagagcatcatgacaaatagttaatgcatgcggggcttaaaacctaggtgacaggttgataggtgcagcaaaccaccatggcacacgtatacctatgtaacaaacctgcacattctcaacatgtaacctggaactaaaagtaaaataaaataaataaataggtccttatgacctagaaaaaaaaaagaatagaccttaaggcactttgaagcttttagttccctttaatcataaaagccacttattaactaaaactagagatagctcaagctatctgattttaaaggcttagtctcaatgtgtcccttccctgaaatcccagtagagtagccaattgtcctgaaacccgcttggatttagcaatgaaacacctcagtcctggccaaaccaagacagtgggtctcaggaaacattcttcatcctaataaaaggcaaattaagtacagttgacccttgaacaacatgggggttatgggtgctgacttcccatgcagtaaaaaatctgggtataactttcgattccacaaaaactttgctaatagccttaactgttaactggaagccttaccaataacacatacagttgattaacacatatattgtatgtattatattacaataaattaagctagagaaaagaaaatgtattcctttagctgccatcctgcctccctgtgtgcttctaatctcagctggtctcacccgggactccccaagtgccaaccctagtcccccacgcagccccttttccactcagataagatgaaagaaacaatcatgaaccaaaaactcaccaaacggcaagcagaagtgcacactggtcggaaaggaactgctcacaggaaaaaggtggttcacagcatctgagacgctgtgtttgagggcaagtaggcccctttgacacctttggtgttgaactcatgaggttttgaatgtccagggacattggccaatatcaaaagaactttaaaagtcagtttggtaaggtacttcttgacttcagggacaaaacagcaatggaaccaatccagaaaaagggttctcattgtccaggccttctggtacaaccaaaagactggcagctggcatttatcttgtcccttcaaggctcagaggttaacggttttatacataagggtagtcctgatcataaacctagcgacagcagaggataaaaaatttcagttctccttaaagaaattaggggtaaacaatatccctggtattgaagaggtgaatatgtttacacaccaaggaacagtgattcactttaacaaccctgaagttcaggcatcgctggcagcaaacactttcaccatgacaggccatgctgagacaaagcagctgacagaaatgctactcagcatcgatcataaaccagtgctgcagatggtctgactagttcaaagagactggctaacactgcccaaacaatctgtgggtggaaaagcaccacttgctactggagaggatgatgaagttctagatcttgtggagaattctgatgaggcttccaacaatgaggcaaactgaattaagtcaacttctgaagaagataaaacttgaagtagttactgagagctgctgttttatgttatgactgctttttaaaaatgttttgtttacagatctaataaaatctagatctctaatatttttaagccccttggacactgcagctcttttcagtttttgcttatatacaattcactctttgcagctaattaagctgaagaagcctgggaataaagtttgaaacaaaggttaataaagctctttgcctagtaaaatatgtgtgtgcctgtgtgtgtgtgtgtatgtgtacacacatatatacatgcatacacatatatgcatatattcacacacatatataaatacatacacatatacacatacacacatatagtattcattaagtagaagtggatcaccacaaaggtcttcatcctcgtcatctttacattgagtaggctgaaaagtaggaggaagaggagggttggtcttgctgtgtcaggggtggcagaggcagaaggggtgaaggaggtagaaggggaggcaggagaggcagggacgttacatgtgtattagtccgttttcacgctaataaagacataactgagactgggtaatttataaagaggaagaggtttaactgactcacagtgccacatggctggggaggcctcacaattatggtggagggcaaaggaggagcaagggcgtgtcttacatggcaataggcaagagagagcttatgcaggggaactcccacttataaaaccatcagatctcgtgagacttattcactaccacgagatcagtatggagaaaaccgctcccatgattcaattatctcccatagcgtccctcccatgacacatagggattattacaattcaaggtgagatttgcatggtgacatggccacactatatcaccatgtaactttatggaaatacattgttaattccgtctgattattttttggttttgctttttaatttatctaaatgtttctatatggtactaatccttctacaactaggcccctttagatttcagtacccctgtatttttagtgactgaaatcatgaaaattctggtcaggtcctgtcttgtcttgcttgcacatgttaaccactccctctttgaccaatatccctttttccccacaatacaattataaactgctgatgtactatttctttgtcaagcagagggaaataacttcagggtcacaaaacatttttgtagaagaaatgaatgcctttaagaatgtttcaaccagctgctgacacccagaaatctggctgctcaaggtgttatctgagactgaagacagacttttcccctgggttccctgaaactccccctcccttactctccagctgcataaaaactctctgcttcatctttttgttaagatagatttgagagagcttgttctcctggcttctcactttagccaaattgaaaaaacctttctctatctccaagcaccgatgtcccattgtttggctccagctgcacattgggcacacgagcctgaatttgggattctacaacacttccaatgtttgctttagtttcaatgctcatgttatagaagagttcatgccataaaataagtcaaaagcagtcttgactaattggaaggcttctgccaggttgtctaatgtcaatttgttttctggccctgcttcttttgacctctattctttattgtctggtgctaattcagaagcactcatctccatcaagtcatctcctattaattcctttcatgtgacgtctgctagttcttggagttctctaagatctatatcttgaaaccctttattcctaccctttttgccatagccacaatctcttttattattaccttgactgtctctgtcataaatcctatgaagtcatgtgcaacatctgggcacagttttttccaaatggaatttattatttcaggcttaatgacccaggattctttttatcccaataatagcatctttaatggcaggtaagcctttcagactttcataatgttctctctctcagatactcttccatagagacaatcctttccatagagtacagtgtgtaacgagccttaaaggtctttatgacccctgagctagagggtgaattagagacactgtgtttgggggcaagtagacacctttgacaccttccatgttgaactcatggggttcttagtggccagggacattgtcaaatatcaaaagtacttttaagttcagtcacttactagcaaggtgcttcctgacttcagggacaaaccatcaaagggaccaatccagaaaaagggttctcattgtccaggccttcttgttgtacaaccaaaagactggcagctggtgtttaacttttcccttcaagactcaagggttaacagtattatagttaagggcaatcctaatcataaacctaactgcatttgtataaaatggtagagtcagcctattccttcctgccttcagtcgtgttgttcgcttgtctttcttactaataaatgccctttgtggcattttttttccagaataaagcactttgatctgcattttaaaaacctcttcttgaagatatccattctcctcaatgattttcttaatggcatctggaaacttatctgctgcctcttcattggcagaagctgcttctcctgttatcttgacattttttaagccaaatctctttgtaaaattatcaaaccatcctttgctgacactaaattctctagcattagacccttcaccttcattttgtttttaagttgttatataatgactttgctttttttgaatgatattagtatataggtatgccttttttatagcaatcccgcatccacataaaaagctgcattttcaatgtgagataaaaaggtatttcaccaacacaggaacagaaaaccaaacactgcatgttctcactcataagtgggagttgaacaatgagaacacatggacacagggaggggaacatcacacaccagggcctgttggggggccgggggcaaggggcagggagagccattaggcaaatacctaatgcatgtggggcttaaaacctagatgacagtttgataggtgtagcaaaccaccatggcacatgtatacctatgtaacaaaactgcacgttctgcacatgtatcccagaacttaaagtaaaatttaaaaaaacaaaaataattttaaaaaaggtatttcaccaaaagtgcaagatttctgcacccactggcatagctgcagcaatggctttacaacattccttttctttttttacaatgatccttatgctggattcatttatcttgaaatggagggcaaccacagctgcagatcatgatctacagtacatattatcaaacaatccaacgttttcttgtaatgtcatgacttttctctgcttcttgggagcatttccagcatcactaatggcattttgaatgggtctcatgatgttatccacggttgatggtattgcactaaacacgacaagaaatacatgagaactgtgagaaatcactttttaccgtaacacccaatttactggagagatgaattgctcttgtgaagatgattttatgcagttataattatgatttaatactcattctttatgtctacatttctttcaacttcaaatggcataatgtgcggtctgcgtgtgtgcataagttttgataaattttaactttctttaatagatttgtgtatattttgttgcagtaaatgatagactagtatcaacatacattttatgcatgcatgacatgcctagcttttccttaatttttttcaatatttctagtctacagggtttatttgtgagtcttttcaagttgccataaaacttcaaaaaaattccaatatatttattgaaaaaaattcacatataagtggccttgctcagttcaaactcatgttgttcaagggtcaactgtaaatctttgaaagtttttctctttatccttctacaagcaacatttgggaaaaataagctaataataatttctttaagagataggttgcatagaatgtctataactgaaatatacatgaataaataagtacatatggatatacactcactcataagcttccgtgagcttcagtttccttatctgtaaaatacaaccaaccatagaaccaaaaggtttcagtaaagattcaatgagattgtgcacagtgtaaataaagcacttagcttagtttcagacacacagtaagcactcaaaattgttatttcttattaagtttcatacttttgtagcacttagattttatatttcagtaatattaaatgaagccattttcacatttttggtttgaagtagcagcttttttgatattgcttgaagattctcacacacaatatctcagaaactgttgatggatgcaaattattttctctcactatatgtggacattgatcattcatcctttgactttcaaaatccacacattcttatcaagaatcaggaaaagtgacaatgctttcttgaaaaatgttatattcttcacaaatgttttaaaacttttttaaaaaaacaagcttgatacattttatcttgtctgcttgtcctttttccaaaatgtaaaggtaatagtgaaaatagccttcccaggccgggcgcggtggctcacgcctgtaatcccaacactttgggaggccaaggtgggcagatcacgaggtcaggagttcaacaccagcctggccatcatggtgaaaccctgtctgtactaaaaatacaaaaattagctgggtatggtggtacatgcctgtaatcccagctactcgggaggctgaggctagagaattgctcaaaccaggacccaggaggcagaggttgcagtgaggcaagatcacaccactgcactccagcctgggctacagagcgagattctgtctcaaaaaaaaaaaaaaaaaaaaaaaaaaaaaaaaaaaaaagggcttccctttttcccactttttaccgtcagtgacccagaacaaacagctttcatttctgatttgcaaagtattcctttaaattgagtatatgttttatgtgaatctatagttttactgataaaaaaggagccaaaactattttttaaagttctttttttcttccggaattagctgcattgagcatgtgcatattaacagtcttttaaattgttattaatatgaagacattacccttcctctgtcggaaggacataacgctgagccatttggagtgagttctgacagatttgccccaaatcacccatatcatcttcttacatcttttttgtggccagaatatagtttaatgctacaactatttcagatattgctgtcaaataaggttttcctttgtttgacattgaaagtcctgaatgggatcaagacaggtgacccaaacctgtgcttctcaaatttgaatgtgcatataaattacattttcagaaacttgttaaacatggattctgattctgtaggggctgattagggctgtggcccaggattctgcatatctagcaagttcccaggtgatgccgacactgctagtctggaccacatttcagcagcacagatctaaagcgatggttctcagcgtgtcgtcttgggaccagcagcccaggcatcacctggaaacttatccaaaaatgcaaattctcagggcacacccctgacattctgaatgagaaactttgggttaaggcccagtaatctgtgtttgcactagacagcctgaggattcagatgcacaaaatgtttgagaaccactgctctgaaaaattaacaccctgctctaaagtaaatttcctgccaacatggaccgattttattgtttactattaagacagaaatcaaggctctcttgggtctgagacatccaggacagtctggccatggctaagttaactgcaggaaaggagcacttaacaaatctgcccacactggtgagtgggccctggaaaagcagaccctgccaccagctctggctgaaatttcatcaggcaggagcattccctacatctgagcatatggatgtcattgaaaccagcagtcagcaggagggaagtctgacaggggttagtagagcagtgctggattgcccaacacagagataggcatgtgcttaaggtacccactaaacagggacactaaaataatgagaaaaaaatttgtgaagaatataacatttttcaagaaaacatgaaaatagatatcatgttgaaaatcacattattcgggttcttcatattaatgttattggttagtatgacttggtgtaatctctagagccagactgcctgtctctaagtcctggctctaccatgtaacagctagataactttggaatttactcatcttgcattgcctcagttttatcatctataaaatggggataatggattttttgttagaattaaatattacatcagatttgcaaagctcttagaataatgccttctatatagtaagtgcttaataaatatttttattacaagtgtggggaaagaaaataagggttccatatttctttcagtgcttagggttttgaaagaattaactgaacaaattaaccaataaaccaaagaagtttaacacaacttgtgagagattagacaaaagtcagaaatgcaagcagataagaggagccatctgaagagatctatgggtcctagagaaagaccaagcaagagtaggatagaactagggaaagggcaggactctgcccaaagtcaggtacgtatcagaaaaaaggaacacaccttaaatctctggggtacacattaggagatgtgtgtgtgctggccacccacaaggatgtatcatcatcagtaactctcagaacttaaggccgcaccactggctctcaccttagctgcaaatggaatcacctggggagctttctaaaataccggtacctgggttctacccccagagtctgtttcattggtctggggcattacctaggcatcagagttccaaaatctcctcaaagtgagtttattagtgtccagggttgagtgtcttgcatcttttaagtttgtcagcattgatcctggaagttgtgatgggcccaactgcaggtaaatgagaaactcaaggataggaaaacacagtccgtgcttattcatcatctccacattcttttttttttttttttttttttttggaaatggagtcccactctatcgcccaagctgaagtacagtggcacgatctcagctcactacaacttctgcctcttgggttcaagtgattctcctgcctcagcctcccaagtaggtgggattacaggtgtgcaccaccacacctggctaatggattttatttttttggtggaaacagggttttaccatgttgcccaggctggtctagagctcctaacctcaagtgatcttcccacctcggcctcctagagtgctgggattacaggcatgagccatcgtgcctggcccaggttctttattcttcatatttatgctctagacttagttccttccaagctgttgctagtacatagggtgcctttgtgcaattcagaagcacattttccttcttcaggatgctttgtcaagaactgagaacggtctgagatgttgccctacgtgcaagctaacgggtaagcctatcgcagtttcatggatggtggcagaagacttgagacttcttgcttttggacttgttttatttttttaatcatctcattcctcagatgatttcctattcatacttcaactttttactaattatttacccgaagattttgatactttaagacatgatcaactccatatactactgggcctaatcctcgttattggcacattgaagcaacataagccacctcagaactgagaaatacagattaaactagccaaatccatgacaatgactgagttgtgtacaaatgacccataccaagtattagatgaaacaagagacttccaagaattggcatggcctcagggagacacaatgtgccactatgtctgaagatgtgccataactgttaagctgccatcttaccagttacaagaactcaagtttaatctcttgcaagaactatactgaaaagatggcctaacaactatgtgctgtcacgtgtctgagtgttgcaacaacaggtgaatgattagtatggaattttaaaaggggaacaaagacaaagaaggaacagaagctaactagcataaactggggagaatttgtatctggcaaataccaacagagaagtatctgctatgttggggcagggacttccaactggctttcccaaggccttggtaaatgtccctccaatcctgtgacggttaattttatgtatcaacttgactgagctaagggatgcccagatagctggtaaaacattatttctgagtgtgtttgtgggggtgtttctagaagagatgagcatttgaatcagtagactgagcaaagaagatccgccctcaccaatgtgggagggcatcatccaagccattgagggcctaaatagaacaaaatgtcaaaggaagagcaaatttgctctcttccttcttgagctggcacttgcatcttctcctgccctaggatgttggagcttctgcttttcaggccttcagacttggactgaattacaccatcttttagttctccaacttacatatggcagattgtgggacttcttggcctccataatcatgtgagccaatccccataataaatctcttatatgtttacatatatcctattagttctatttctctggagaaccatgactaatacaccctcccactgcttcattccagttccacatttggcaagcaacattccatgactcatctggcttcccagccatgttgctatagggaaggaccccagataatgaaagaaactagccttgcaatataaaggaactaaaatgatacgttggcattctgatctatgcatcagactctcaccagtttgttagtgagactgtcatttccccggtggcagattgcctgtaaatcctcagtactaaagctggatccagccatggacatgcagctgacgacatgaaggcattttcccaagaaggccacctggcctctctaaactccccctcattactccctgatagcaactggtcccaccccaggtttcatcctatcctaaggtgagtgcctgagctgaaactggtccctaaaattccagaagtctttggagacagggcaattctaaacccttcagggaagtccctgttgtccaatttaggacatgcaagcagaatgtcactctcaagactgaaatattacttctcaactgtttaaagaccagaatgggatgaggacttggaactgccatatgcacccaggatccatatttattcattcagcacccagaatgtggtagataatagatactatagatacagaggaaaatgagatggaacattaaccatgggctgatattgtcacaggactagttatcagctttgcagggcttgagtcaatcagtggacccaaagttgaccaggatcttggggactcactctcactaacccaagttacatgagaatgaagagtcaagcagaattccaatttgttaatttatattgatcagaattttatcatttctagtgtctataaggagtctgctattagaccgttctctgtatcaaggtgcctggaaaggcaagttatcaatgttcactcggttagttaaaggaagaatggatgctgagggccacctcacacacaacacgggaatgcctaactttgatgggtgcctccatgttgaaaaactactatctttatagcaatcctgtcaccatgatatgaaatttgtttttctctagaaaattagctaatacagatggtcaccctaattatcaagtaaagttagaatgagctgtgtgacaaatggtgctgtcatgtcttcttgagaactagttattgtttatcttgaccacatgcaggtagtgggttgtatcctgcttggttatataaaaggatgagacttctgtctttgccatctcatagaggattgcctgtgatgtgcattacattctggtttaacgcttattgaataataaatgtgttttctttctctgctttctcaatagagaggatttctgggctgggaggagattttgtttttaactgtatttccctaccatcttattcttccacatgcacagtccttagcagtgtttctcatgtataaaagattttctgttgatttctaccattccttttcctattttcacacatctaagagcaagaaggatttttttttttttttttagtttgtggggaaaaaggtaatactaattcaaaatataaagccatagtcagaaagtttgaaaatctttgcaaactagattttattaataatgttaaacggtgagggtggggaaatatgttcttagtggataccaaggggtaaaaaagaagggaaggaggaagggagctacatgaagtaggaattctggaaggcagaacccaagtagtcatacggaaggtaccaagccttcgaaacatcacaagaggctacattaattctaactcttttcctaaaatttggaggaagtattaagatgttgaaatgcatagctaatttgcatactttgaatgagtcatgacaaatatttcaactgacaagaatttttcacattgaaacatgatgatagtgagctttttgtattagctgtcatccctataatattcagagacggtgttattttgtgtaattcacttggagggtacagatctcacttacccactcacaaaacaagggtaatgtgttggggtataaatttaaaatccaggaatgtgtgattgcattgtgctgtaagttcatgctatgttttcacaaaggctaaaaggttagcaaaataaagataatttatgagaagcaaaataagaaattggaaaagtacatatagcagagaatcttgtggacccatatgttttgggcaccagggagatagacgatatcatggcttctcagtgatctgtgtgagggagccctcagcactcattctttccctactaaccaagtgagcattgttaacttgccttcccaggcaccttgatatagagaagggcctcaagaacacactcctgtacatattagaaatgataaaattctgatcaatgtaaattaataaattggaattctgattgattcttcattctcatgtgacttggattactagagtcagtccccaagattctagtcaactttgggattgaatcaatccctgcaaagctgataactagtcctgtgaatatgtggtcactcgccaagataagcccatgggtaatgtttccatggagtccagactcagcaatcagctgatggctctttgtgattctctctctctcctgccccttctctctctcccttccttactccctctcctctaatttcacaaagccatttttagaattctcatttatcacccaggtgatccctctttcccatcataaaggttgtagccaatacacctataacaaatgagaaattagcaagagaaaagcataacaagtacacttgatcataggtttatgtgacatggaagttttcaggatggaggcctaaaaatacaagggaaactgttcatttttacgcttaggttctatgacgtagggacaaccatttagaaaggggattggacaaaaagggtatgagctaatgggaatagactcagtgggggaaacccagagaggcctgcatgcccagattcttcttggcttctctgtgcagcactcctttctcctgggtagaaccgctgtgaatgaaagtcttttttttttttgagacaggttctcactctgtcacccaggctggagtgcagtggcacgatctcagctcactgcaacctctgcctccctggctcaagcaattctcccacctcagcatcccgagtagctaggactacaggtgtgtgtcaccacccaattaacttttgtattttttgtagagatgggatttcacgatgttgcccaggctggtcttgaactcctgcgctcgagcaatctgcctgccttggcctcccaaagtgctgagattacaggcatgagccactgtgcccagcctgaaacaagagtcttaatttctttatggccagttgttacacagaaatgtgggggaaggttagaggaatatttttaggctctatggctggctttagggaaaagaggttctaatttctatgctttgcctcagggagaatgaggggcgagagacaggagggcaaaaggttggagacagactttgcttctgaggctgcttctgaggctttcatttgaaggtattgttttctgagccccaacaaccataaaaatacaaatggagaaggggataaaatcaccaagatagcaacaaaatatcttgcttaatgatctatgatttactaaatgggacagtcaaagccacatgaaaaaatatgaaaagcaggccgggcacagtggctcatgcctgtaattctagcactctgggaggccaagctcaggaaattctagcactttgggaggccgagctcaggagttcgagacctgagctcaggagtttgagaccagcctgggcaacacggtgaaaccccgtctctaactaacatacaaaagaaattagctgggtgtggtggcacatgcctgtagtcctagctactcaggaggctgaggcaggagaattgcttgaacccgggaggcagaggttgcagtgatccgagatcgcaccattgcactccaggcctggcaacagagcaaaactctgtctctaaaaaaaagaaagaaagaaaagaaaagcagatgatgacagttcttaagggaatatcatcataactgaagagccaagcccaataatgcgtggcatgccaccgtcccctctgaaaacgaagtgaccacggaagtcccacgagactccagcagccctgaccacagccgattggacccacagcagacacggaatattctaacgtttagtgtaatccaaaatgagatgacagaggcagggtgagaggctcacacctataatcccagctacttgggaggctgacgtggtaggatcacttaagcccaggagtttggagttacagcgagctatgactgtgccactgcactccagcctgggagaaaaagactctgtctcaaaaataaattaattaattaaaaagagataatagtgagtaaacctgaagctctctctgtaggtctgtgacctgcatattttttaaatgttaacactgtaatatgaaagcgtggctgaacagttagccttgctcttttggcaccctgaccagtgcctctcactttagctgagtttaagagcttccttaagaaatgaccagcaaactccatgatctccaagcctaagggtggtcattttagcttggggaattgaggacacagaggcaggtcgacagcagtcagagaaatcctgcagttgagggtcatgtcccaacactacaatctgacttaatctgtatttgtcaatatatgaaagaacaatgcagaatcactggacatgaataaaaccaacagcatgaaagagaggtgccaagatgaagaagccttgtaaaaggtcccagaagaaaacttgtatttaatatttgaagtaattttctcaaagacactgagaagttacaagattcataaaacaagatattaccggccatgccaatggatatgttaattaagttcacacttacgggcactaactccaacagaagcttccactttcacaatgtctcaatagccaattacatgtgatcaaattcactgtttatacagaggacttcacacaccaccaaccatgcaattaatatcaacgcacagggaataatcagaggcaggtaacaaaccacagcaaccgtgctggtgaccaatggttaacacaccagtcaagtgggtcctgagtccttggtagggtcactgcttctctctgctgacatccaccaagacaggagaaggtctcagacttaccccgggcagagtctccaaaggcatctctgagaaggcctggtctttgctgcttttataatcctcagccacttttcactttctattgggttcagtccaggtcttcggtggtacctggtgacaacaggtgctattacctctgtccattacatgtatgtttatcacattgaggcaggtgcagcttcactgtgggcttaatgcagcttgacatgagtgactcccttttgagacattaggatcacaaaccattatgacatatcataagaaaacactgctatgtaaaatgttcatcagagaacaagagttagtataaaagaaaaacatggttgccaaaataagaaacatattaggagctgaaaagccaaatgagcacaactgaggaacaaattagtgattagaagaccaagtcatacaattctaccagaacactgaatggaaattctatgcaaaactatggagattataaaactcaagtggagacaaggagaaaaaatccagagtcataataatctatattcagaaagagaaataaagaagaaatggaatccagaaaattgtagaaaattgctctgagatgaaaaaaaagacttgatattccaatagagtctctggtttgaaatgggaatatcaaaagaatgtaactagatttctgctgttgagatatttaactatattgcttttaaagtctgggataattctatatttaagtttaaaagagcacaaactacctcaattccattctgtctgctaaatgtgcataaacaatttctgcatggaatattttttaaagtctgctggatttattcaaataaggcatcaatccatcttactctgtttttagcagacatttggtacagggcaatacagcccatggataatcactcaatgtttgctagttaactaagaaacactaacagtctatttgatgcttatgagaaagcaacaaacaatagttttcttcaaggtagaatgatttggagaatgcatcataaccatgctgagctttcacaaatgtaaagatttcttcacaataaaatatgttgagacagtcatatttaagcaatgcttttacagccacacagccattcaattgtactgattcctcactttatagtccctgcaacttaatcccttcctgtacgcttaaaaaattccatacaaagtttaataaaacaaaggcacaatgtacatatacatacaaaataaacactgactctatgaggcattctcctaaatattcgtttttaaatatagtttcttaatattttacaccttccttgttaaaatgtgatgctgtcgaccagcctggccaacacggtgaaaccccatctctactaaaaatacaaaaattagccaggcgtggtggtgcgggcctgtattcccaactactccagaggctgaggcaggagaatcacttgaacccaggaggtggaagaggttacagtgagtcaagatggtgccattgcactccagcctgggcgacgagagcgaaactctgacaaaaaaaaaaaaaaaaaaagaggaagaaaagcaaagaagagaagagaagagaaaggaagagaagaaaagaaaaatgtgatgctgtcctaagggctgggaaaaatggaaccagaacaatggcatatagataatggcctaaggtggaaacaattttggtaattgttgataattgttgctgttgttattttaaagaaattaaacacaatttgccccaagtttcatcttttataaaaccattctcatggtaagtacgtttcaatgacccaaatgaattaacaaaaaattaatcggggaaatgaaccctgattgctaccgctgtattttctcctaaaacattggcttacaatcaaatgaaacttaatcataacaatccagagattgactcatccgatgttgcccaatagtggcaaagaagggcaagtcagaaaaaaaggaaactgaaattcaaagactgtaatcagctattttggacaaaattaaacaaattaaatggcttttcttttttcaaaatagtctctattctcacattcctgatttgttgtttcaaatatttccagtttactctgacagttcacattctcccacaagcatcccttataggggagctgctgttatcaggatgaagataaagatctattcattgtattctatttgctggcagaccagcactccagaacaggataaaagccacagccattaaaaaatagattctcggctcggtgtggtggttcacacctgtaatcccagcactctgggaggccgaggtgggcagatcacctgaggtcaggagttcaaaaccagcttggccaacatggcaaaaccctgtctctactaaaaatataaaaattatccaggtgtggtggtgggttcctgtaatcccaggtactcaggaggctggggcacaagaattgcttgaactgggaggcagaggttgcagtgagccgagattgtgccactccactcctgcctgggtgacagagcaagactttgtctcaaaaaaaataaacaatagattctcctgacacatttctgttggggatgagggcatgagttaatatgactgactaattgaaagcatcaggtttgcattaattcattcaacatttactgagcaccacctatgtgtgaagttgtgtgtgagaccctgggatattgtgatcaacagggtagatcagttccctgcctaaaaagaatgttcctatctaacaaagggtacaaagaggggaaacttatatcccctgggaacatacaggtagggcacataacctaaacttaggatgttgtggtgggctcttcgatgtagttcttcctttttttttttttgtagagacagtgtttctggaccaaactgagggtcgggctgcttattctcatggcccaataatgagatgcagatgaactgggaaagaagcgaggtttttatttctgtaaccagttacagggagaaggcctggaaattatcaccagaccaactcaaaattacaaagtttcccagagcttatataccttttaagcgatatgtctgtgtgtaagtgtgcattcatctaaagacatacatgattaacttcttctaatctatgactaagatctgagtcctgaagaccttcctctggagcctcagtaaatttacttaatctaaatgcattcaggtgctggagtgattacccttaatttgtctgatggaggcaagatcatggaagtctggagagttcctctagtccccagtaaagcttgtttgtgaaggtctgaggagttccttcagacccacaagaaaacttgtttaatcctaaatgggtcctgttaagacttccttcattattttgtcatgctataagacccgggaaaagcctaggcaaaactcttggtgggcttttgttgcattctagcctttgtatgagggcactgcctctatcagcttttaacatttaacctaaccactcagtcagtgctgaaacagttgttatgtaggcctgggttagtgagacctggcctgccacaatggagtctcattatgctgcccaggctggtctcaaactcctgggctcatgtgattctcctgccttagcctcccaaagtgctgggactacaagcatgagcccagccctagatgtaacttcctaaagtaaaaattgtgtaaaactttagacagggttttctcaactttggtgctgttaacattttgggcctggtaattcttttgttgttggggttgtactgtacattgtagaatgtttagcaacatacctggactctacccataagatgccacaatttggtgacaaccaaaatatctccagacattgcccaatgtcctctgggaacaaactcatccccagttaagaccactagcttagatgaaagataagaaaagggaagttgtagagtgaaggagaagaaaaaggtagaagggtagggagagaagacataagaagtaagagggaatcgttgctacaaaggtcccttagacaataaaaatcatggccccataatgggtggtgggtggcagacgctaagcttgatttgagcatgaagagataactacagtcttataagggcccttataagtcatattatcagcttggagctttattaactatctattgctatgtgtgatggttatgtcaacttaactgggccacatggtgcccagatagctggtccaacattactctgggtgtttctgtgataatgttttggatgagtctaacatttaaatcaatagattgagtaaaacagattttcctccctaaggtgaatgggcttcatttaaccagttgaagacctgaataaaacaaaaaggctgacccatcccaggataagagggaattccccccacccacaagaaagatgggcttttgcatttttacacagagcattttaactcctttgtcccaaactcttccctaataggattgaaatggaacctcaaggctcatggagatttcctccataatttaaatgctgtcttctccaaagacaaattctgccaccatatctagaacaacaggttcagatttgaaatcacttgtttttggtacccactgtaagtgcaaaccaattggccagaagtaggcaatccaggggaagtggcaattgcccagaggagcagagttaattccaggcaagccatatcatagtgatcgataataggcaaagaggcctggacaagctgtgttgaagcagactccagcaatagcaggatggcagggaggaaggcactacattccagaagccaggcagaggatcaagaatcagagatgtacaaatatggaaagagccattcaggaatgagcaagggtacaagctggggaaaagttcattaacccccaatgcccttccaggttcttaatctcaagttgccagaaacttctggatggcacatttgtctctagacaatggtgaccaacagggtgaagtggaaggggaaaatgggtgtgtacattaaatattgcacgtcacattttacctaaccgatttgagggcatttgattgttttcttttcttttttttttttttttttttttgaagggtcacgctctgtcacccaagctggagtgcagtcgtgtgatcatagctcattgcagcctcaatctcctgggctcaagtgatccccctgcctcagcctcccaagtagttatgactgcaggcacacgccaccacacctggctatttttttttttttttattttttgtagaggcaaggtcttgttttgttgcccaggccggtctcaaactcctggcctcaagtaatcctcccaccttggcctcccaaagcactaggattataggtgtgagccaatgcacccagtcatgtttccaatttttgatcttataagcaagggtatgaattttgtttgtgtgcaggtggagttttttcccaaaaattttccatacatccatgcttacttccttaggataaattttgagaagtagaatacctagttaaaagagtgtgactattcttctagtattgacataagctatgtaggcacaaaaggcaatcctagttttactataaatttactttttctgatgcctgtgagtaatcatatgatcacgattactgtacatcctagcctcattgaattcttcatccacgtaagagttaaacaattccttaaagaggaagttaaagtgagtctagtcaggaggtgttgaaatgacagaaattctagggttagaacaaaatgaagggaaatgggtttgagaggagtgaagggtataaaggcagtcagacatccagcaaacaaattactcctctggttcactcctcctgaactgaacctcttctttacaacgaaatgatgctcaaggtattgtagcattttatgtgacttacttaaattgcttttctagcagacttcttccttcctcaatttcttcagttgccctctccttttaagaactacctgcttctgctttaacttttctttcaacctgtgggctacctaattaactgcatggtggctttcattactgttttacaaatgagatacatgattctattgtacaaagttaggaagggaatgaattatgacaagttcattgaattttaaccccctagttttatgtgtccattatgacgctgccagattgcatttctgttaatctatttactgtcaccaccttctgtataagataagctttttgaggcaggaaccatccagtattgacttggcagtcttgagagcttagaacagtgctggactcatagtaagaacttgtgggccgggcacagtggctcaggcctgtaatcccagcactttgggaggccgaggcggatggatcacgagatcaggggagatcgacaccatgctcgctaactcggtaaaacccggtctctactaagaatacaaaaaattagctgggcgtggtggcaggcgcccgtagtcccagctactcgggaggctgaggcaggagaatggcgtgaacccgggaggtggagcttgcagtgagccgagatcgtgtcactgtactccagcctagcgacagagcgagactccgtcttgaaaaaaaaaaattgtgaaattgatttgttcagtggctttatgttattctttaacttaaataatcactgtatttaactaaacagagatgcaaatgccatgagaaggtcaagcagatcagaagatattttggaaatagatgaacgcaaggaccacagacagctgagcagctgtgtgtttattcccctcacgtttcgttccttcaggggccagggacagccatgtgttctttggcacacagggtgctgttcaggacttccagaggattccagggctccaccttcctgtatcaccagcagcacggtctcatatggatggatggtgcaagtacctccagggctccatgtcaccaccccacctcccccactgctccccagtctcacattcctccataagacacccctgggtcagatctagccctgaagagatgaatgatcaatcactacatgcccccagctgtggggtttgtgggggtgagaagagaggtttaaaagaggtagttttgcttagagtcagggatccaatcaatatttgaaactcttaagtttaaaccctttcttcctctctctttctgcccctaaaaatattttaactgcaatttctagcagcgtgaaaatcaacattattgttattcttccaccctaatctgaaacctttgtgccaccatcctttctctctcccagccatcttctctcctgctttcgcccaccccatacacccctccacctttctatcaaagccctcagagacataaaaaatagcccatccttttgaaaatggcaagtgttccttgacttgataaacctgacatgaggctctgtaaatgggactagtcagtgtccaggttgaaggacgttcagctaggcacgggttccatctctgtagctctgtcctggcactgagctcagtatcaaagaaccccagataccccaggtcccctaatccaatagcccctcaccctacagctaagatttaaaaatgaagtatctgatgttgagagagacaaattaagttgtgcaatgatgtagtaaccagaacaagaaagggaagcaatccaatattcactaggtggtgagcagatagtgaaacctgacttaagagtggatgtttttaactctacataatagatgctctcttgtgaaaatgtgtagaaaacaaaataacagtctacatattgaagaatttgaattttaaaagaattgcagagtactccactgcttatgaaattcaagtaatcttacatgtttttcttatctagcttatgggtagaagcagaatgagcttctccagtgggatgaacacagacacttcatattcaacaagttcacactgagcccatcatcattgcttggaaggctgctcctcttcctgtgttctctctcttggccaatggcactgccatttccccatccagaacctgggatactgcagcagtcttttcactgcccctgtctacccctctccaatccattctctacacaactgcctacaggaatctttccaaaacattagttctgaccataactctacttttcttaagacagcactttggctccccattgacatcacagtctttagagtgatgtaatgttcatcattcggtcataagctgcaaatccattctccttctcacctctgtctcctgcatgcaactccacagctgaaaggagccaaactccctccactctctcacacctcccagccttggcccttgcttccacttctacctttaccctccattctcatcaccctacactattatctgatgactactcttaagttttcataaccagatcaagtatcgatgtctccaccaacagggaagagcaggcagtggttctcaagtcacatatgtaatttaaaattttctagtattttaaattttagaaaatgtttagaagaaactgatcaattaataacatgttttatttacaccatatcccatatattattatgttgatatcaatatattgaattttttttattaagatgagaggagtctcactctgttgcccaggcgggagtgcggtggcatgatctcagctcactgcaacctccgcctcccaggttcaagcaattctcccacctcagcttcctgagtagctgggattacaggtacccaccaccacacccggctaatttttgtatttttagtagagatggggttttgccaccttggccaggctgttcttgaactgctgacctcaagtgatccatctgccttggtctcccaaagtgctgggattacgggcatgagccaccacacctggtcaatgaatagaacattgattcagcatgcaatcaatatttttaaattattgagatgctttatatcctttttttcctactaagctttcaaaaatcagtctttattttactcttatgacacatctcaatttgctgcatttcaagtgctcagtagccacattagggagtagctgccatattgtacgtaagagcaccagagcacttgagagcctcctagagatcctaatgaaaacagaatcctgtgctatgcttccagaggttccatttctggggagagtctaattttggtggtctggagtggggaccagaaatgttccttttcagcaagaaccccaggcagttctgaggtacatgttcgtctgaccatttgggacttgatagctagatgcactgattgtcgagttacacctataggggtttatgttcagattccaccacctaaaagctgtgaaaattagtaacttcagttctctaggtctcagtctcctcacctgcaaaaataactacctagagacttgtgggtattaaaagggtaatatatttgagacattcagcacagtgcctggcaggtgtctcataatagcagctgtgcactgcacccgcagaaatctctatcacacagacgaggtgtcccttgcatcctcctcccacaactctctgtgcttccctccaccaccacccatcacgcaatgctgtgtcctgtgcttgctatgctgcccctcaactcaactgagaagataaactggctgctgtgtgctcccacattactctgcctcacacatagtaggtgcttagtacacatctttttttttttagaaattaaactaaatctgagcaactgggtttcttgtagtggagcaaaactctttatgcaaaagtgcctcaaggtgtcttatagaacagaagtgtgtaagtaaagtggggtgtatccctgtcctaacactcttccctttaaagtctatcacagaaagctttgccacagcaatccatggcttgaaagtgggacacctgacagatcgtgttattcagaggagcaagaggatgattctagacactctgggtgctgggttcctgggaaccactacggaagtgtttcacatagccagccaatatagcaaggtaagaagctcaaggtctacattagagataaaacccagtgcatacatatgtgttacatttactctatacttcgttttatagacagcacttgatgtacatagcactgttctatatcatttttataatttcctatgttccattatctgagttttaatagtcatccatattctttactaagtcactgtcttaaaaccatacacagtgaggcacagtggctcatatctgtaatcccagcactaccagaggccaaggtgggcagacggtttgagcctaggaatttgagaccagccttggcaacatggcaaagacccatttctacaaaaacaaaaaacataaaaattagccaggtgtgatagcacacgcctatagtcccagctactcgggaggctgagaggtgggaggatcacttgagcctgagaggttggggttgtagtaagtcaagatcatgccactgcactccagccaaggcaacagagcatgaccttgtcttaaaaacaaacaaacaaataaacagaaaaaaaatatgctaataatatctcacagtttattattattattctctggagaaaagcctggtcaagtactctgagcagagtggggatgtatgtgagagctcctgctctccctagggtgtattagagataaacagttagtccatcttccctggtatttaccccaaggagtaaataagagtaacttcagatgtgcttccttggagcacttccggatcatgatctaggatcaagcaacgacatctcctccccctttcacaggggagagctgtgtattctacaaggatgagaggtattcaatgactagggcttctatctgtggcaaaggttcaagtaagaactatgaataatgcctccaaagatgaagaataactcttgaaatggtgacttggtatactgtattcacactatcactggttgatttgcttttgttccagatctacagttccaacatatccagcactgtttggggtcagccagacatcaggctcccgcccacatatgctgcttttgtgaacggtgtggctgtaaggaggttttcacgtcttttcaactattagataatcataataattttagagtcaggaaatatctcagaaattgcccaaattctatattttacagatgaaagaactgaaagtcagacagataaagtggcttaccctctctcctatgtagtaattcagttttcatgtttttacagtaaattgatgcttttcaaacagattgtgtagcagaggaaagaagatggaaggatttagataaaaacaccctaaggtatcccaattcaaaaccttgaatataaatagcaaaaaaatataaaacccatatccagacctaatatcttctgtttttcctgttgtggggccagtttctctcaagtaatgtgttctttattcattcactcattcatccattcaacagatagttattgagaaaggaacaatggccttatagtgtctgtattttctgaaccaaaaatctgtacttctcatctgacagatgatttttatgctttttctgtgtgtcacgggaaatattctacaagatgtaacttggaaacagacatgttgggatttccgagatatttttatgatttatgggtacaatagctcaggagattgaaagttaaagccaacggtgcattccaaagcaatgtcctgaaagcagtgggaaatgcaccagtgacagcaaatagatataaaaatctatttttaaatgaacttctggatattactgttttaatataaagaaaaagaaaatggctaggagaaagaggaataagatcttaaagcagaaaataatgatttttaaaatatatagctgaaaagttaatctgagtttgacagttattgtgctattcttacaacttctctaaaagtttgaaattatttcataataaaaaggtacaaaaacgtatggcctcatatggaataaatgacattaaacttgcagtgcaacttatttaaagggtggaggaggaattgccagccacctgattctgcagctttgtttttaaaagggaatatagatctttccaggggccacagcagagggagctcaggccaccagggcaagacccaagctccttggggctcacaagctgctctccaaggtactcccttcctctggcagaggaacagcatttcccagtgcccggccatgtgattaataatcacagccaggccaggtgtggtggctcacgcctgtaatcctagcactttgggaggctgaggcgggcggataacgaggtcaggagtttgagaccaccctggccaacatagtgaaactccgtctctactaaaaatacaaaaattagccaggtgcggtggtgggcacctgttatcccagctgctccagaggctgaggcaggagaattgcttgaacccaggaggcagaggttgcagtgagccaggatcatgccactgcactccagcctaggtgacagagcaagactctgtctcaaaaaaaaaaaaaaaaaaaaaaaaaagaaaaaaaatcacagacatttctcagattttcttttctgagaatcagatcaaaagaatctcacataaaacaaggttattactaaactaagtccttagtggtccaaaagccattgcattaagggaaaatttaaggctttttgttgctgtttgtgtctgtttatacagattcactccatggattttgatgacacgtggcaccctgccacccacccttctggggctgtccttcctgtcctcacagctttagcagaagccctgccaaggagtccaaagttttctggccttgacctgctgctggctttcaatgttggtattgaagtgcaaggccgattactgcatttcgccaaggaggccaatgacatgccaaagaggtatggagagaatttgccccatcaaaaggtagtcacatccccttcatctatcaatcattatctccgtagagctttctgacttagaggccggttcagaggaagatgttaacattagcacaggtagataagtcaatacaccagtcacatacgaaaccctctatccacatttaaagaagtgacttcaagagtgcaacctggaccgtgagattaattgggcctctcgttgcaaggtgattcatgtcattctggcattcatgggtgtactgagtattccttatttcattctcaaagcagaatctattctgagactagctagcgtccctcagactaatgaggacattcagaatatccttactctgactgttcatcctgcagataaaaaatggtcaaatgtcggccacatcatatggctcagtctcagatttatgttgccacttgctccagcctgccaggagagaagtaaattgaaatactaggtagtgaagtttcagtttcttcaaggcccacaattctcacagtgacttagatgagatctcagcaatcaatagctgttgcctttctggcaataattgtaatggtaccatttataaagaactcactatgtgctagcactattgtaaacatgttaatttattcaaagctcctaaaactctaagaggtagatgttattattatcaccattttattttattttttgagatggagtctcgctctgttgccaggctggagtgcagtggtgtaatcttggctcattgcaacctccgcctcctgggttcaagtgattctcctgcctcagcctcccaagtagctgggactacaggcatgcaccaccatgcccagctaatttttgtatttttagtagagacggggtttcgtcatgttggccaggatggtctcgagctcttgaccttgtgatctgcctgcctcagcctcccaaagtgctgggattacaggcgtgagccatcgtgcccggccttattattattatttttattattatatttttttgagacagtctcactctgtcacctaggctggagtgcagcagcatgatctcagctcactgcagcgtctgcctcccaggttcaagggattctcctgcctcagtctcccaagtagctgggactgcaggcacccaccaccacatccggcaaatttttgtatttttagtagagtcagtgttttgccatgttggccaacctagtctcaaactcctgacctcagatgaccctcccaccttggcctcccaaagtcctgggattacaggcatgaaccaccacacctcgcctatcaccattttgtgtaagaaaaactctacagagaagttgaataattttccccagatcatatagctaataaagtaatggagctgagatctgaacccagacagtgtgactccattatcaatgttcttgatgactacgctatcctgcctcctggtggttacggtttgtacatctccaactctgcttctttgcttttcagattccatcccccttccgtggtaggaacgttgggtagtgctgctgctgcatccaagtttttaggacttagctcgacaaagtgccgagaagctctggccattgctgtttcccatgctggggcacccatggccaatgctgccacccagaccaagcccctccacattggcaatgctgccaagcatgggatagaagctgcatttttggcaatgttgggtctccaaggaaacaagcaggtcttggacttggaggcaggatttggggccttttatgccaactattccccaaaagtccttccaagcatagcttcctacagttggctgctggaccagcaggacgtggcctttaagcgttttcctgcacatttatctacccactgggtggcagacgcagctgcatctgtgagaaagcaccttgtagcagagagagccctgcttccaactgactacattaagagaattgtgctcaggataccaaatgtccagtatgtaaacaggccctttccagtttcggagcatgaagcccgtcattcattccagtatgtggcctgtgccatgctgcttgatggtggcatcactgtcccctcattccatgaatgccagatcaacaggccacaggtgagagagctgctcagtaaggtggagctggagtaccctccggacaacttgccaagcttcaacatactgtactgtgaaataagtgtcaccctcaaggatggagccaccttcacagatcgctctgataccttctatgggcactggagaaaaccactgagccaggaggacctagaggaaaagttcagagccaatgcctccaagatgctgtcctgggacacagtggaaagccttataaagatagtcaaaaatctagaagacctagaagactgttctgtgttaactacacttctcaaaggaccctctccaccagaggtagcttcaaactctccagcatgtaataattctatcacaaatctctcctgaggcttaccaacatctaaatgactttgcatttggggagattcaatgatttggtttgtaaagcaagggtctgctgcttggttttcccaggaaaaatgaacaaagatggagagagtccagaaacagaactacatatatctggaaggagccttctcctgaaaattttgcaggacagttccacttacctaaatcaagatgaaacacacacacaaaaatgagtttgtaagcattcacaagggtgaaattcaactcacctgtgatttacttataaaattaatctcttcataggaattatgtgtggacttcatgagcctcaaggttttagagggatgtgaacctgcatgtatattttctgacagtggagagggctctggtgcattgtgtcaccaacagatctcctagaccatggcttattaccaagccctccacagtgcaaggggtgctactggggaatgggtgggtttaaatcctgcctctgccattcactagatgtagccttgagcatgttaccattagccctctgcctcagtttccctatttgtcaagccgaagtaaaaagcagtctggaaaaatcgcattttggctctagaacccatggtcttaagcactgcaatatatcacctttcagtataaaaatatttgaatcagagttgcaataaagaatgaaaaggaaaaaagagaagtaaatacgtgagtaattatataaatactaaactgtattaaaataatagaagtgtcatgggggttaaaaatgcaacactaacaatcatagttaatgtgttacaaatccctggtattgttcaataaaagggcaacctattaactctagatgttgattaataagtatgctgtattagtccgttctcatgctgctataatgaactgcccaagactgggtaatttacaaaggaaagaggtttaattgactcacagttccacatgacagaggaggcctcaagaaacttagaatcatgccagaaggagaagcaaacacgtccttcttcatatgaaggagaagtgcttccttcataggaaggagaagtgctgagcagaaggcaggaaagctccctataaaccgtcagatttcaggagaacttactatcataagaatagaagcatgaaagtaactggcaccatggttcaattacctcccaccaggtccctcccacaacacatggggattatggaaactataattcaagatgacatttgggtggggacacggtcataccaaatcattctgcctctggcccctcccaaacatcatgtcttcacatttcaaagcacaatcatgccttccctacagtccctgaaagtcttaactcattccagcatcaaggcaaaagtctaactccaaagtctcatctgagacaaggcaagtcccttctgcctatggacctgtaaaatcaaaagcaagttagttacttcctagatacaatgggggtaaaagcactgggtaaatacatccattccaaatgggagaaattggccaaaacaaaggggctacagcccccatgcaaatccaaaacccagcggggcagtcaaatcttaaagctccaaaatgacatcctttgactccatgtctcacatccaggtcattctgatacaagaggtgggactcccatggccttgggcagctgtgtccctgtggttttgcagggtacagccccctcctcccagcttccttcacaggctggcattgagtgtccacagcttttccaggcacatattgcaagccgtcggtggatctaccattctggagtctggaggacagtggccctcttctcacagctccactaggcagtgccccagtggggactttctgtgggggctgcagtcccacatttcccttctgcactgcccaagcagaggttctacatgagggctccacccctgctgcaaacttctgcctggacatccaggcatttccatacatcctctgaaatctagaaggaggttctcaaacctcaattcttgacttctgtgcacccacaggctcaaaaccacatggaagctgccaagacttggggcttacaccccttgaagccatggcctgagctgtaccttggcccattttagcctcatctgggatgcagggaaccaagtaagccctgagactgtagaaagcagcaaggccctgggcccagccaatgaaactatttttctctcctaggcctctgggcctgtgttgggaggcactgctgtgaagagttctcacatgtcctgcagacattttccccattgtcttggtgatcaacatttggctccgtgttacttatgtgaatttctactgatggcttgaatttcttctcagaaaatgggtttttctcttccatcacatcatcaagatgcaaattttctgaactttcatgctctgcttctcttttaaacacaagtttcaattccaaaccatatctttgtgaatacataaaataggatgcttttaacagcacctaagtcacctcttgaatgctttgctgcttagaaatttctcccaccagataccctaaatcttccctcaagttcaaagttccacagatctctatggcaggggcaaaacgccaccagtctctttgctaaaacgtagcaacagtcacctttattctagttcccaacaagttcctcatctccatctgagacctggattccattgtccatatcactatcatcattttggtcaatgccattcaacatgtctctgggaagttccaaactttcccatatctttctgtcttctgagcccttcagacttttccaacctctgcctgttacccagttccaaagtctcttccacatgttggggtatctttatagcagtaccccactcctagtaccaatttactgtattagtccattctcacactgctataaagaactgcccgagactgggtaatttataaaggaaggggtttaactgactcacagttccgcttgactggggaggtctcaagaacttacaatcacggcagaaggagaagcaaacatgtccttcttcacatgatagcaggaagaagaaaagccaagcagaagggagaaaagccccttataaaatcatcagatctcaggagaatgcactcactaacataagaacagcagcatgaaagtaaattgcatcataattcaattatctcccacagggtccctcccacaacacatggggattatgggaactgcagttcaagatgagatgtgggtggggaacacagccaaaccatattatatgtccactgaaatttctaggataaccattcgagaacagcagtagaatgtaccacttccaggttaatagaaggagaaaaattgaattagaaaaatataatctggccaggcatggtggttcatgcctgtaatcccaacactctgggaggccaaggtaggagtactgcttgagcccaggagtttgatgagacagtctggacaacatagtgatatttcatctctacaaaaaaaatcaaaaaaattagccaaacatggtgacacacacttgtagtccctgctactcaggaggttgaagttggaggattgcttgagccccagaggcataggctacagtgagccatgatcatgctgctgtactccagcgtaggcaacagagcaagaccctcaaaaaaaaatccaaaggaaggcaaaaaatgagggggaaagaaatataaaaaaggacatataaaaagcacaaaataaaatggtaggaaaaattcaaatatatctataattacaaaaagagtaaatggactaaatgttccagtttaaaaagaccaagatttcctgaacatattttttaaatgtttaacaactttattgatgtttaatttacatattaattcatccattttaagtgtacggttcagtaagttttagtaaatttatagagttgtgcatgcatcaccacaattcagttttggaatacttccttttactccaagaaattttctcatattatctgggatcaatccccattcccacctccagcccatagtaaccagtgatgtatctctataattctgttgtttctagacatttcggacaaatcaaataatataataagcagtcatatgtgtttgccttctttcactggcataatggttttgagattcttccacatatgtgtcagcacttttttgcttttcattgctggacagctttccattgtagggatatgccaatgtttgtttacccattcactaattaatagacagttgggttgcctccagtttgggctattatgaatagtgtttctatgagcatttacgtacaggtctttgtgtgaacatatgtttccatttctttttgatagatacctaggagtgactctgggtcactgggtaaatatatttttaactttataaaaaacgattttccaaagtagctctatcatgttacgttttctccaacaatatatgagggttccagtttctcctcatacttaccaaaccttagaattgtcagtcatttttatttcagccattctagtgagtgtgtaatgttatctcattgtggttttaatttgcatttccctaatgactcattctcctccatttttccagttctttttattgtgtggtcttcttatggtatggacgtatacctggaatatataagagctctttatatattctgggtataaatcctttatcagatacatgttttgtaaaaattttctcccactctgtggtttgtcttttcattttttaaaaaaaatttatcattctggctttggatgtcatcagaagactttctaaaatccaattatatactttatgcaagacaaataaaaaatgcagaagggttgacggtataaaagatgggggatatacggatggaatattaacaaaagaaaactggacaaataaatgttagtattggaccaagcattactataaatagtgtcactatgtaacgataaaaaattcaaatcaccagctaactgaaataatcctaaccctacatgcacctaaatcatattgaactgcaagaagaaatccatctaccaccatactgagagatttttaacattcctctcctattaattgatattcaaggaaaccaaaaataaatgggctacataatatttaaacacaatcaacatgtttatacaacaggaattctgtacccaacaactagagatttcacaatcttttagaaatctcatagaacatttacaaaagtggactaacactgagccataatgccagtctcaacaacttttcaaagtactggatcatacagttattttctctaatcacaatgcaattaagttaaagatcaatattttaaaaaagataattagaaaagctgccagccgcagtggcacacatgttcgtgcagtcctggctactcaggaggctgaggcaggaggatcacttgaccccaggagattgtggctacaatgagatatgatggcaccattgcactccatcctgggcaacaaagtaagaccctgtctggccatcagagaaatgcaaatcaaaaccacaatgagataccatctcacaccagttagaatggcaatcattaaaaagtcaggaaacaacaggtgctggagaggatgtggagaaataggaacacttttacactgttggtgggactgtaaactagttcaacccttgtggaagtcagtgtggcgattcctcagggatctagaactggaaatagcatttgactcagccatcccattactgggtatatacccaaaggactataaatcatgctgctataaagacacatgcacacgtatgtttattgcagcattattcacaatagcaaagacttggaaccaacccaaatgtccaacaatgatagactggattaagaaaatgtggcacatatacaccatggaatactatgcagccataaaaaatgatgagttcatgtcctttgtagggacatggatgaaattggaaatcatcattctcagtaaactatcgcaagaacaaaaaaccaaacaccgcatattctcactcataggtgggaattgaacaatgagatcacatggacacaggaaggggaatatcacactctggggactgttgtggggtagggggagggaggagggatagcatcaggagatatacctaatgctagatgacgagttagtgggtgcagcacaccagcatgcacatgtatacatatgtaactaacctgcacaatgtgcacatgtaccctaaaacttaaagtataataaaaaaaaagaaaaataaataaataaaataaaataataaaataaaatgtaatccaaaaaataaaaaagcctgaagtatttgtaaatgaagacacacaaattttttttattttatattttgcatcacaaaataaataatgaaaattataaaatatttgggactaaccaatgacaaaaatactacaaatcagaactggtaagatgtaactgaagcagtactttgaaattacatgtagaatcgctggctctctattattacttggattatgctgttccacaggacacatcacaaatccctgatgaatttgtctgaacacagctgatcaaagaaaaggtaaaagaggtttctttaattgtagccctgaggtaaatttaattgtactttcttgatgcattgcagacgtttctaggggcaacatctaaggactattaataatatcctcagataagacctgacagatgcctcagaccaccagcaggggttggggaagccactctctcctgagggggacaagagtactcagggtgaccttgatgttggtcattatgcccactgagtaaactgaaggcaggagaatacatcagggaaatgttggcctatagagagagctgaaggctcctcttcactggcaggccacacatataaatgggagagacagagaggaagagaggggagagagatccactctccacatcctttccaggtgatgatttctttctttttttcttttctgtttttttttttttttttttttgagatggagtctcactctgttgcccaggctggagtgcaaaggcacaatctcatctcactgcaacgtctgcctcctgggttcaagtgattctcctgcctcagcctcccgagtagctgtgattacaggcatgtgccaccatgcctggctaattttctgtatttttttagtagagatggggtttcgccatgttggccaggctggtctcgaactcctgacctcaggtgatccacccaccttggcctcccaaagtgctgggattacaagcaagagccaccgtgcccggctttttttttttccccagacagggttttgccctgttgcccaggctagagtgcagtggcatgatcatggctcactacagcctcagcttcccaggctcaaacaatcctcctacctcagcctcctgagtagctgggactacaggtatgcaccatcatgcccagccaatttttttaatttgttttttgcagagacagggcctcactatatttcctgggctggtcttcaacttacaaagggcgagtggagaccttgcattggaatgctggagttagacctgagccctcttgtctcttccttccatgaggctggagaacaagcactgtttctgagctgccctgccctgagaaagcctgagatggggctagaattttgatttaaagtctaggaattgatctgacgtctaggaattgtggcaaatgcttgcgttttccctctcattcccttagggagaacaaccaaagatgctgctcagtccatttttattgttatagggcttaggtacaagcaaattagccctccacatggatcaggccagatcaccagggagaaacccaccctgagcctgggacaaaggcttcaggctcacagagaaagtttccatttcagctccctccctgtacttctgcatccttggcacacatccatggccccgagtcaaactgcctcagtcagcagaaacatttttgccatctttaaagagccctagtgctggctattgcatatgtttcagggatgcctgaggccatgcacacatttggtgattcatgagaaggacccagcatttagtagccccgtggctagggtttactacagtgcaaggatacatgacacgataagcaacagaaaaacacacatgcaaagtctggaaaaatccaagcacaggcttttaatgctctctccctcccctgaggagactcatgaagcaggctccttttgtcagcagcgaaaaattcagtaatgtgtgtgcaatgtttctgccctagaaagagactcagcattcaaagattttacatggttggttatgtaggcaccctctccctagaaataatcagaattccaaactcaaagaagaaaagcgggtattcagcataaaccaagttgcttgcgcagtctagatacaatgaatcattcttatcagctagagagtgggttaaagtgctatgttcctagacaccagccaagggccagcctggtaagcaagtgtttcctaaagcagcagcctcaggtctgctatgttatttcttttctgcgtggcttttaaacctgaaaccccttcctttcctgtttgtgcagctttgcagggtaggaaaatgttatataaaagttggacctcacctccactttaggcattgccactgctctgttgcacttgagccctgtaagctgtgtgttctatcacagtattaactaaagctgatatccccagtaggcttaaaactgtaggatttctgcacagagatccgctgttggtctgatgggcttccctttgtaggtgacctgtcctttctctctggctgcccttaacattttttccttcattttgaccttggagaatctgatgattatgtgtcttggggttgatctactcgtggagtgtcttagtggtgttttctgtatttcctgaatttgcatgttggcctgtcttgctaggttggggaagttctcctggataatatcctgaagtgtgttttccaagttggttccgttctccccatcttcttcgggtactccagtcaatcataggttgagtctttttacatagtcccatatttctcggaggttttgtttgttccttttcattcttttttctctaatcttgtctgtgtgccttatttcagcaagatggtcttccaactctgataccctttcttctgcttggtcgcttcggctattgatacttgtgtatgtgttacaaagttctcatgctgtgtttctcagctccatcaggtcatttatgttcctctctaaactggttattctagttaacagctcctgcaaccttttatcaaagttcttatcttctttgcattgggttagaacacgcccctttagctcagcagagtttgttattacccatcttctgaagcctacttctgtcacttcatccatctcatcctctgttcagttctgtgcccctgctggagaggtgttgcgatcatttggagaagagccattctggcctttcaggttttcagtgttttttcgttgattctttctcgtcttcatgagtttcaatctttgaggctgctgacccttgaatgaggtttttgtggagacttttttgttcatgctgttgttgttgctttctgtttgtttttctttcaatggtcaggtccctcttctgtagggctgccgcagtttgctggggcttcacttcaggccctattcatctaatttgctcccactcctgaagatgtcactcaaggaggctggagaacagcaagatgggtgactcctccttcctctgggatctctaacctcaaggagcactgacctgatgccagtaggaatgctcctgtatagggtatctggcaacccctgttggaaggtctcaggtctcacccagttgggtggcacagagaacaggacccgtttaatatagcactttgaatatcccttggtggagggggtgtgctttgctggggggaaatgcactcgtctgggctgtctgggttcctcagaactagcaggaggaaagactaagtcagctagtccgtggagactatggctaccccttcccctaggggctcagacccagggagatcagggttcagtccctgagcccctggctggagttgttggagttcctgcagggaggccccacccagtgaggagggatggatcagggtcaggcctgaagaggcactatggctgcatctgccacagccagtgtattgggctgtggggaatacctcttgggaccaacccgtccaacctccctggcttcagcggggagaaaagcatggcctggagctatagtgatggctgccacccttcccccaccctgggagcttagtgtgttaggcagctagcagtcccagtgttggctgctgcccctctcccaaggagctcaaatggcttagacagcaggcagtgacagctgtggtgctcgccactcctcagctgggaacttggcaggcttaagcagattctagctgagtggctgttgagaatctccatggctccgtggctgagaccctaggtcccagtggagtgggctcacgagtgggatcttcccatccgtgggttgcacagttccatggaaaaagcacgatttcccaggctaggtagcacgctcactcatcacctcccttggctggggtgtgggggctcccctgacccacgtggctctcgggtgggccaccacaccacactgctcttccttgctctccatggatcatgccagcctcctagtcagttctgataacagaatctggacacctcagttgctggcgcaggattcacacactgttatggtttttgctgggagcctccgatctctgttgcatagtttcacatggctggggaggcctcacaatcatggcagaagatgaagaccaaagagatgttttacatggcagcaggcaaaaaagctctcattctctttatggctgcacagtattccatagtgtatatgtaccacattttctttatctagtctatcattgatgggcatttaggttgattccatgtctttgcattgtgagtagtattgcaatgaacgtacatatgcatatgtctttataatagaatgatttatattcctttgggtatatacccagtaatgagattgctgagtcaaatggtatatttgtctttaggtctttgaggaatcaccacactgtcttccacaatgtttgaactaattcacaccaacagtgtataagcgttcctttttctccacaacctcgctggcatctgttatttattgactttttagtaatagccattctgactggtgtgagatggtatctcattgtggttttgatttgcatttctctaatgaagatctgtgattattttaagccagctgcttataatgagaacatgtgagttttaaaggaatgtttataaattatattttataacaacttcgcttggaaggttttatctaaaaaacatcacactcagagaactcccgtgtgataggccccagggaccaccgttaagtactgtgatagcttgtgtaaaggaaactctttgggggatactgggtaaataatgggctttcattcaatttaacacgtgtgtattgagggcttactatctgccaggggatattctcagtgcaggtaatagagcaatggacaaaataggcaaaacctcctgttctcatgagcttacgatctattatgggtagagagacaacaagcaaaataattgaataagatgaggaaagtgctctgtgcctgttctgggcagcctctgcttgctttgttcctcccctggtaggaatgtaagcttctggtgctgagttaggttcagggactagaagagtccaaagaatgtgagcctccctttaatggaattaaaagcttccagttctttctgggccatgatataacctatgactgcaaaagaccagtggtaccatacaaaggtagcttccttgtcgattctagcaagacttccctgcacagagcaaagctatagggaatcaaggtagggggcaaaggggcaaagtcatgacaaaatgtgctgcttttcattccagcagagttgtgcaagtatgtacatgtgtgtgcaatctcttctcccaacaaaagatctacctgcaatacttcgcttatttaaaaaaattattcattagtaaaattactcatcctctgttctctgaccataaaaaaaaatagcaccgtaatagttcacagaaagtaataattcaagacattcaaagcaggtgagtatgtcataggcaactactcaggctcttgcttaaaccctgggtgcccagtagtttgcagctgtgtggcacatcaaaagaatttatgatacatggtaactttcttaaagcttcatggctcagctgggaatggtgactcatgcctgtaatcccagcactttgggaggccgtggcaggaggactgcttgagcccaggtgttcaaaaacagcttaggcaatatagggagaagctgtttctacaaaaaagtaaaaaattagccaagcatggtggcgtacacctgtaaccctagcttacttgggaggctgaggtgggaggatcattagagactgggaggcagaggttgcagtgagctgagatctcaccactgcattccagcctgggcaacacagcaagaccctgtctcaaaaaaaggaggtgggggggggtcatagttttattggaatcataaagaacagaacaggccaggcacggtggctcacgtctgtaatcccagcactttgggaggcagaggcgggtggctcatctgaggtcgggagtttgagaccagcctgaccaacatagagaaaccctgtctctactaaaaatccaaaattagctgggcttggtggcacatgcccataatcccagctacttgggagactgaggcaggagaatcagttggaaccgggaggtggaggttgcggtgagccgagatcacaccattgcactccagcctgggcaacaagagcaaaactccgtctcaaaaacataaaaaataaaaagaacaaaataaacaccttccaagaaataactaaaattagtttagtcttccagcgcagttgtaaatgcagaattcaacattccgatattaccatctcatttaaaaagttatcctttttgtgcagttattacaaacaagtcaaccaaccccagttacagctggcacctatgaaggagccaacctggaggttcaataaaaactttaaaacagcccaatgcccatctttcagaagcatggcatgatagtgttgcttctgactctaaaaaataaaaaatgtacttttttagaaaccatgtatgtcagtataattgctacttacttatgagtcaagatcacaattaaagtacctaccatcaagtgaaagagtatgtaattcatctggtaggagctaaactatttttacctgaacaatttcttctaaatattatacgtcaagcactatatctcaagcctgctgtaaaacatgtcctaccatttttactaatccaccagaaatatcatgcaaagagccaggtgcagtggtgtgtggctatagccccagctactcgcgaggctgaggcaggaagctggcttaaacccaaaagttcaagactgtagtgcacaatgatcacatcagtgaatagccactgtactccagcctgggcaacatagtgagactttatgcctaaaaaaaaaaccatgcagaagggccatgccatgaatgcacatgtcagtgccattttgttggtaacatccccataggatttactcacatccatgtttacagctagggccctgtacagcagtgtctctgtcatcaccagaaaacatatcatgaagagaagttataactgagtggggaaaaaaatgttccttaggcacctggcaacatgaccgtgaaaaaggttaaaattactggcttacactggcctctcaaacactgccaagttcagaaaaaaagctcacagatattatgcacccaagaaatcggtcccaacatgaggcttcacttaaatacccagttagtaagataaatgaagggtaaatgtactaggatcaatatgaaataattaaagcaagcgccacttgattcttacagctgaatgatatgataacagaattgccacgttgaatttttttctttcagagtaagccaatgtattaatagtttgaaagaatatattttccatatgattcaagccatctagtcttatcaccttaaaccacagccccttatcacctccacctccaccctaatgccaatcaccaaatgctgcagccccgtaatgaatgataatttgtctagcaccctgggaggccgaggccgggggatcacttgagcccaggagttcaagaccagcctgggcaacatggcaaaaccccatctctacaaaaaatacaaaattagccaggtgtgttggtgcatacctgtggtcctagctactcgagaggccaaggtgggagggtcgcttgatcccaggaggtcgaggttgcagtgagtcatgatcacgccactgcagtgcactgcactgccagcctgggtgacagagcaagactctgttacaaaaaaaaaagataatttgtcaagctattagaaaagtggtcacgtctatatttatctgcaggaaggaaaataggaaagcgccgtaggacctgcttactcggcaggcagctttctatccttttctttccctctgtccacattattatcctgacccgctgtgacttcaccagcaggaaggtttcggctgccaagccaggggaaatgcagcagcagtagcgatgggcttcctcccacaggggaaggcttgaagtgtccttcacagaactgccgacagagcagtctttcccatccagggcagctctgagctactccaaagccaccagcaaagacgacgacccaggattatttaaggcagctgacaagaagaatggatgaacaaatcttgggcaaagaatgagggtatagaagagcaacacataacacacgtggttaggatgtaaaaatagtatttctttaatgtcttctagaattgatagtgactttgaattaattcattaactttgtttttttctttcccattaactttttttaaaaagtcagtaccgcagctgggcgtggtagctcatgcctgtaatcccagcactttgggaggccaaggcaggcagatcaagaggacagaagtttgagaccagcctggccaatatggtgaaaccccgtctctactaaaaatacaaaaattagctgggtgtggtggcgtgcgccctactcgggaggctgaggcaggagaattgcttgaaaccgggaggcagaggttgcagtgagccaagattgcaccactgcactccagcctgggtgacacagcgagagtctgtctcaaaaaaaaaagactctgtctcagtatcacaacctataatcgtcaagataccttggagatctttttgtaaaaaactgatgacaaattctgaaacacactcaaatcattaaagacattacatagcttcaatgtagccttatagcaagtggactcaatagacataaagggcttatattaacctaataataataaataatcattttgcatcaacagtatgaaattctgaagattcaagctgggacacctatcatgatgctaatttttgctaaatatttcaagtttggtacgaagtagaactatatctattaaaaagcttttgagataactccatacattttaaaaacataaacctatccttatgtgctaaaataaaatattttttaagtagcagtaattttgacattaatttgctagtaatactaccttagatgtgaaaacactaatattagcaccagacttcaggagcaataacccttacaaacgtctctcgggttaaccgtattagcagtagaagaaaagagtgaattctcaaaacacccacaactcaaataaaatgaatctccctagccctttctctctctggggatttgtagatagatttaaacttacattttattcataatgtgtagcatgtctccaaagacagttatccaatatccatgcctcctggtattgatgcccttttggggtcccctctccttgaatcgaatctcacttttgatccattgaaagctgcagaagtgatgcagagagacttcttggctacattgtaagaggaaagcccaagtctcttgtgctaaaattcttaattgggaggacattaggttgagagagctcagcactctgggttcctacaaaagcaacctgaaacccaactcagagtgaacggtcacggtcatcccaggaaaacaacacttaagcttaaccaatcagaaaccaccaaccaacctctaactagagactttaccaatcagaaattgccaatgaacctcaaactagtgacttttcactttaaccactcaaatggttttttgtggggtttttcttttttttgccttgcttccaagaacatctagagctgcccaattcatgagctgtctattcaaataaactggttaaaatttgaatgtgcctaagtttgtcttttcacacttagaatccttgttctggggaatgccaaattcgcatggaaaaagcctaaccaccctgaggcctacgagttatgcggaagcccaggattgccacagggaatggtcacatggctgcatggccagccttcagctcttcagccatcctagcccaggcaccagacatgagagtgaagacactgttgtggatatccagccaagccaagcctttagatagctgcagccccagcctctacctcaatgcaacattattagacaccccaagcaaagcccagctaccccagctagtactggggctcctttttctgcctaagatccagacccaccaaaaggtttcctccccctctctctaagaccaagaatgtcaccatacctgatcagactctttcacaagataacgtgcaagttaatctctgttccctgatccattcattcattgtccctagaaatcccctcaatggaattcttccaccccttcctgcaacctgtttcgccaggatgatgtataagcttttgaacccccttaggggatgggtaatcactctgtgattcgcctggtgtacaccttaattaaatttgtatgccttttctccaattaatctgccttatgtgggctgacttttctgagaatcttcagagggcaaagagaaagctttcctttgacctctacgttactcaacccacagaaccaagaaagataataaattattgattaagccatgaaatgtaagcaataaatgtctggaacactatatatgtaaaatagcagtaagcaacctatttggtagatgtatagatagcaacaagcaacacacactcctgatccaatacaatgattcccaattctcactgtgggacatctccaaagtgtctccaaaagctttagaaacattgtgaatgaactgatataatctgacaataaaactaactttgtttagtttgaaaaatataaacataggacatactattccttatgaagggaattaaaaagaagtcaaagaaaaatatctgagaaaattgtactcataaatgaatcttttatttaagtaaataaatctttttttttttttttttttttttttgaggcagagtctcaatctgtcacccaggctggagtgcggttgtgcaatcttggctcattgcaacctctgcctcccgggttcaagcaattctcctgcctcagcctcctgagtagctgggattacaggcacgtgccaccacacccaggtaattgtttgtatttttagtagagatggggttgcaccatgttggccaggctgatctcaaactcctgacctcaagtgatctgcccacctcgggctcccaaattgctgggattacaggtgtgagccaccatgcccagcctagtaaatcaatcttttatttcaatttatttatttcaataaaagattgatttatggttttattgatcacaaatcaaattaaagtctaattttaaatcttttatttgaaaagggagcgttatcaatctaaaactgatttctgccctgaaaaggtccagaaacaggcaaaacctctactgtaattttcaaagtctgaaggcctcaaagggtggtctgcctgcaacaccccacctgttgcctagaagccgaatcagaatctgcattgtaacaagatctccaggtgagtcatgcgtccattgaagttgaagaagtactggcagagagcagcagttcccaaacttgtctgcacatgagaatcatctgggaatctttttaaaattccgaaatccaggccataccctagaccaacgaaatcatgggacacaggcgttgatggttttgaaggctaccaggtgattccaatgtgcagccaacttcgagacctagtggtcaccctagatagggcactgggaaatcacttggggagcataaacactaatattggtttccacccccggagagtctcatgtcgctggtctcaggtatgacctatgcatctggagtttttaaaagctccaggtaattctcatgtacagcacagtttgtacagccacagacctggagccaggcacagaagatttcaaaatggcagctgagcctgcaccactccttggcgaagaagggtttaaagtcagtgaaccttaattaaaatgaacagttggcctcacagttttcagctaactcaccaggtagaatgacagcatcaagcttgctcgagttcaggtctgccaagtcttggacgtccctccgggctctcctggcactttcctccagcacatttctcttctttctgttgggctccctttcaagtgattaacgatgagcatctgctcgacattaggcgcaaataccttcaccttcaaaaatagaaagaaaaacacatgatgtcattacctctatgaaaacaatcaagcaacactatctcagaatctaaaccaggaagccaagaccaaaagccgcgaagtgattctgtatgccttcagggccaacatcagctagaaatattatagctcaaccacaaagaagaaagtgcaggggccttctaaaagggggaaaaaaagagctgtaaattagcttccaaaaggaagggagatcaagtagattacagagaggtggcttttcagataaatatatatatatatttctttaaatagatgaaagagaggatgtaattttatagataggaacatacaggactcaaaaaattggaggattaaatcagcccttgagatccttcaaagcagtgcttctcaagctagctacacattagaatcacctggagagcttgggcaccaacgaggccaattcagtggaaatctctgggagtgaagagccagcctgagccttgctccagcttaaaatctccccaggcgattctgtttgtcagggctggcaaccactaatctaaagcaaatgggagataaaactcagggctcagagttaaaaccccggagtcttcaatgccaagaccccgcagcagggcatttggtagctctcgcttgatccacctccatgcctccagccccaccaagctctgggtcacccccggttcatcctcagaaacactcgagaggggaggacatcactctagtttccctgtctccaaccctgggatcctgtaggggccctgatctggggaaacatgaggacgtggaggcaagggaggaagctcaggggagacacttgtatattgggggttgcctttgagccacaccttcttcactggcttctattccaacctaaaacacacaggtcagcttcaccaggaggtacacgaggctggtctgaatcaaatgtcccttgactctctgaaaggatggcattagggctgggaggcataaaaatcaagagtctcagcctcttgttactaaactttgtatttcactaaagtatatgctaagattctaaacattctctcttcgtatgttgttttataaaattgaataatagctcctatctgatataccatatatacatacatatatgagcttagaatctcatatatatatatatatatatatatatatatatatatatatatatatatatgagaaaagactttgaatattctgaagggcaagaaagatgcagatgcagatacaggctgggcatggtggctcatacctgtaatagcagcagtttggaaggccaaggtgggagaattgcttgaggccaggaatttgagacgagcctgggcaacatagtgagacccctgtctctacaaaaattaaaactaaaaaattagccaggaatggaggtgtgtgctgcagtcctacctactcaggaggcagaggtgagagaattgcctgagcccaagagtttgaagttacaatgagctttgatcatgccactgcactccagtttgggtgacagagcaagaccccgtttaaaaaaaaaatgctaaaaacatggatttgattttaaagaattccccaaacaagttggccttcagttgtttcacggaataatcagatgaacatgctcaaggagtgaaacacgttttcaacatgtgcacgtcctttggaactgataagaaagcactgaggcatttactgggttgtaatctagactcaataagtccatgtacctctcccggacttcatctcaagcacagagacctgagttcattaaatactcacaaaccccagtgtgtaggacatcgcccttcacccattaggaaatcagtaactacttgttgaaaggatgaatgaataacacccacattaatcttaatacccttcaagtgaaagaggtgctagatatttcctttcctaagttttagagaaaagagaattggcttctaggactgactttgtcactgcctagtgatgaccttaaagaagtcatttttcctcccagggaaactcagccaggagattgaacagagatgtcctccagcttcaaacttcaaatcctgcagacaaagaaattaatgaattgtatattttaacttattaaaaagaaaggtgcagcagctgtggcggttcctcacaaagttaaagagaactaccatgattccacttctaggtatatacacaaaagaattaaaagtagggactcaaacaggtatttgtacacccatgttcatagcagcattattcactacagccaacaacccaaatgtccatcaacagatgaatggtacacaaaatgtggtgttctacatacaagggaatattattccttccttaaaaaggaaggaaattttgacaagtgctaccacatggatgaaccctaaggacataggccaagtgaaataaggcagtaacacaaagacaaatattatatgattccacttgtagtaagtacctagagtagacaaagtcttagagatagaaagtagaatgtaatagaggctacctggagctgggagaaaggagaatgaggaattagtgtttcacggttgcggttgcagtttgggatgatgaatatggtctggggacggacagtggagatggctccacagcattgtgaatgcacttaatgccagtcgatcacacactacttaaaaatggttaaaatggtaaagttcatgttacatatgttttactccctccccctcccctccaaaaaacaaaacactattggcaaaggggtagcaggtgaggggcaggctggtctggtccttgtgactgcgaacatccctgctgcccgttttttgtctgaagcccggctgggtcgctggagatccagcggagtgtgcggagggaggcgtgttggataccttttaaaaatgagaagccccaggccgggcgcggtgactcacgactgtaagtcgcggcccaaccctttgggaggccgaggcaggtggatcacttgaggtcaggagttcgagacaagcctggccaaaatggtgaactcctgtttaaaaaaaaaaaaaaaaaaaaaaattagcagggcgtggtggcaggagcctgtaatcccagctactcgggaggctgagacagaagaatcgcttgaacccgggaggcggaggttgcagtgagcccagatcgtgccaatgcactccagcctgggcgacaagagcgagactccgtctcaacaacaacaacaaaaaaaaattagaagcccctggggacggagagcattaggacaaatacctaatgcatatggggcttaaaacctagatgatgggttgataggtgcagcaaaccaccagggcacatgcatacatatgtaacaaacctgcacgttctgcacatgtatcttggaacttaaagtaacaaaataaaataaaataaaataaaaataaaaattagaagcccgagagagggaaaacagcttaggaaggggttgcccccgccactccgcaggctgcagagggaagagaaagcgcccccgtggcgcccccagggccgtgcagcccagacctagccccgcagccccacataccccagcacctccgaagctgcgtgcagagccgctcgctcccacctccggctgcacccgcgcgcccccttgcggcggattccgctctggcgcatagccccactggagcgctggcgcgttggcgatggggtcccaggtgggagagagatctgtccgctgaacctgcgcatcccggcccctgcggaggctgcagagattctgccctttctgttcggagggaagagagagggcgccagggagacataagctagatttttattaatagataactttatttgaaaattatctttaaacgaaagagcaaggggaaaaatggattctatcctttgccgcactactaaaaagtaacttccattcaacttatttcaaaagagaacgtcgatattgatatgcaatacttttaattgttttaaaatatttaattgtgtgcaataatttttttaactgctcagttccaaagctggaagttgaagtgatgtttttgacagggaagactgaagaagagaccccattgcatcttcatcggagctggaggacaaaaaaaaaattcttaggacacttaacatggagagtttgagatccggatacagcgtgggctgtaactaagggcagtggaagcaggcagccttggctaggatgccgctgctcctcatgacattttgtctcacaaacttagcaagttcttagaaagtccaaaacgccatatgtgttgcctaattttcttatatgatcacaggaaataaataggaaaaatgcagataatttgcattttatttgataatttttaaataaaagttacttgttaataaaatttcaggtaggatgctccctgagtttcttctgtacaatatcattcattgaccagatatttgaagaaaagttattctttgtttttttgagagcaggtactgtttattaactgaccagcttagaaaaataatcatggtagacaccttagttcattattctaataagctgttgatctggtcctccctgttgccagcatctccaccttctacaaaatgggtggtctttttcttctttccacctcatggagaagataatttgaaggaccacaggaagttatttgcttcttcgaagcattttccaacagtatagatctcatgaatcagatcttccgtgcagatgatgccatatttaccaagcgttcgagcaatcaaagcgttatctgtcaaagcaattcgcttcttattgattttgccataaccccgcttgtagattagtttatttactgacttcagatttgggtaccccctgcaatatatggttctacaatccccagcatgttaattgaaaccttgttaagcttcacaaagtttccactgaagatttgacgaaggcgaagaagctgcaacacctttcggacctttgggctcacaccactgatacctctgatcctgatgacaaatgccaatttgggttctgcaggtacatagaagttgccggctttgcttgccatccttgccattcaaatttaagttccgtatatctgtctatattccttgtgatagtgcttcgctttttcatagataagcttcctccttgcctttcgaagcatcttttgggcaaacttctttctcaggcatttgatcttcagctctgtgaaatttcttcgctttttcttaagggtttctggtacagcaggaaactttttcttcttctctttgacactctccatggttccagcgggaaaagaggaactattcctttattattaaaagatgaaatctgcaatatccagcaaacattactttccctactggatctttaaattattagtcccatgttcctctgataaaaattcactaagcctttatgtcctgggtgctgaataaaccctgcatttactttcaagaagaaacctacctttcttaacctggaggtagattgctgctcataagtgacagatggagtactgtaaatccccgagggtgattctagctcttgacccagtaggatatttactgtcaacgatgcctagatttagaaagaggatgtaaacgtggtgtgacaccagacagggcaaagagcaactgcttgtggaaaacacacatgcatccgtcatcactgcagatgaggaggaaaaggaggacaaggagtgaatttgaaaagcaggataacttagtgtaggtctgagtgcccaagatcaaacctgactccaccctcactgccttatgtgatcccgagaaattactcaaaatatctgtaccaacgtttcctcaggctgaaagtaggaagtagcacctttttcatagagttgttggaaagattaaaaatagtaaatgtcatctctgtcaaaaccttgatactagtgtatttctgttcactgaatggtttgtacccctttagtttccttgatatacgttgattaaaaaaaaaaaaaatttgactgggcccggtggctcacgcctgtaatcccagcactttgggaggtagaggcaggcagatcacctgaggccaggagtttcagaccagcctggctaatgtggcgaaaccccgtctctactaaaactacaaaaattatgtgggcctggtggcacatgcctgtaatcccagctactcgggaagctgaggcagggaggcagaggttgcagtgagccgagattgcatcactacactccagcctggcctacagagcaagactctgtctcaaaaaaagaaaaaaaaaatcaacaaaattgattaaaatgtctaattggcttttattagtgactcataaaacaggcagttgctaatcaaaatagagggagcttcaatgagcctggcagaccagttggttttcctaaggtagcttgaacagaaatagggaaacaggaatacaaaaagtgaattggttaacatcagtttacttcaggttactttacttataaagggttaaagcagagaggacttccttaacatgctgacttaggctgactgggccctttctgattgcttgctgtgaatctcttgtttttacgaaaagccagtctattttgggaattttcccgtttacgtttcagtttgattacagttcgattacttagcacgagcgaccccattttggttcaatctgttgcgacctaatgcaggggctcagttcaaaaccatggcctctcatacattttatttaacaacacaaagaaaagagtttttgttctgaagccaattttcttgcggctattgataaatcgatcataacagaactaaaaaatatattcaataaacaagtacaagattaaagaattgtctaaacaatgtaatgtaataagcaaaataaatccaaatcacttgatttaggattagggtaaggtgttccttatggctccacagtttgtttttaagtattacctattaagtagatgtctcactctaatctctgccttcagtgaatattataaattttaattttattaaattcacacttaaatgatgcttttaaaattatctttgggtcgggcacagtggctcacgactataattccaacactgtgggaggctgaggcaagaggattacttgagcccaggagcatgggcaacaaagtgagactctgactctaccaaaaacattttatttaattagccaggcatggtagcacaggcctgtagtcccagctactcaggaagtgaggtgggaggatcgcttgagcctgagaggtcaaggctgcagtgagtcatgatcatgccactgcactctaacctggacaacagagcgagaccctgtctcaaaataaaaatgaaaataaaattatctttgaactaaaataaatgatgctttaggcaagtgaaattgtcgaaactctgaaaataggatgtacgtatagttgatgtatttgtttagcccagtttatcatgtaaacaacaggttagtatacccaagtttcagaaacactttgggggttcattaatttttggttacctttaagattttcttaacctcttacatgaatatttgtgtcagggccaggctctgtggctcatgcctttaattccagcactttgggaggccaaagcaggaggatcgcttgagcccaggaattcgagaccagcttgggaacgtagtgagactccttatcactacaaaaaatttaaaattatttgggcatgttggtacattcctgtagtccagctactataggggctgagagatgggaggatcacttgagctaggaggctatggctgcagtgactgtgattgcactactgcactccagcctgggtggcaaagtgagaccctgtctcaaaaagaaaaaaaggagtaggaaattagtgtgtctagggccggagctcttaggcaaactggtgaagccccttctcagaataatgcttttaacgcctaaaataaaaaatgagattgtaaatgagaaactaaaaattagcttggactttaatctgccctcgtattcattagcctggactgataaaaccagcctcaaaattaccagaaaacagtacttctctcaaaccacagtaaatcataaagtgtcataacaacctcctttcttttctacttaatttttttttttttgccaagtcctttatggaagttgttgtgcgtgtctctgttgtctttgtggaaggccagagccacacggtcctaagagctgggaaccaggaagcataggctgatctgaagaagacacttcaatcatgggtgatattaaaaattttctgtatgcctggtgaggcaaaaggaagatgactccatcctatgaaattagagcattggggaacaaaagtaggcagaaattcttgtgtgaggttcaggtggaagggtataattacagtggcataggaaattccaccaataaaaaagatgcacagagcaatgctgccagagactttgttaactatttggttcaaataaatgaagagtgaagaagttccagctttttggggttgcatctctgcccccacttactgatattcctgacactacagcaaatgctgaaggaggtttaccaacaaccatgggaggtcctcttccgccacatctggctctcaaagctgaaaataattctgaggtaggggcctctggctatggtgttcctgggaccaaggagccaacttgaaggattactactcaagaaaggaagaacaagaagtgcaagcgactctagagtcagaagaagtggatttaaatgctgggcttcatggaaactggaccttggaaaatgctaaaactcatctaaaccaatattttcagaaagaaaaaatccaaggagaatataagtacacccaagtgggtcctgatcc

SEQ ID NO: 33 - DNA, 159400 bp, Homo sapiens
  Genbank Accession No. AL121766
  unsure (1)..(159400): n = a or c or g or t
gaattctcttttctcctttccatagcaatgttccaccataagttcattaaggtgactaatccagggtattcaaggaacactactagttcatgtcatcttcataaatatgaacataaagtatatgacatgaacataaagtatatgacaatggcagcttgtggaaagggccacttacagcacttcaaaatttcttctatgggccttgaaataagtgtgaaggaaattaacagatttagaaatgattttgagaacttacttctatgactgatgacctttcagttctaatttctatttacatgtgtccttatcataagtcttttttgtgcttctgctagcttgaatctttctccctactttgtaactatgttctgttaagaaaacaaacctagctgggtgtggtggctcattcctgtaatcctagcactttgggaggctgaggtaggaggatcacttgagctcaggagttcaagaccagcctgggcaatatacggagaccccgtccctacaaaaaataaaaataaattagttggcatggtggcacatgcctgtagtctcagctgctcaggaggctgaggtggggtttcttgcttgagcctggaaagttgaggctgcagtgagcagtgattgcactactgcacaccagcctgaacaacagagtgagacccttcctcaaaaaataaaaaaagacaaaaaaaggaaaacaaacctaaaattattgtggtttaacatataaaagctaatttctctcttacataggatctgcagctatcaaaaatagctcccttctaaaggtaaacctagagctcaaggctgttttaatcttgtgactttgccttctcaataaatggattccactgctgccacagcagagaaagggagcagaagggctatacattggcttttaaatgcctcagtctggagtggacacacatcatttttgtacacagtctgttgtccagagttagttcaatagtatcgtcaaactgcaggagggctctgaaaggtggggctcacatggattgcagtgtgtagtaaacgcttctgccacacaactaaatgagccttagtgaaacaatcctattaacacagattataagtagcataaactgtacagtaaggagatggattgtagtcctttgtcaattgtgttgaaagattctggctcctgcacttggtcaggttgaacattcttatagaaatatcatttcttcctctaattataatttgagataatgaagggaagattacttgtgaatacgggaaaaaatggaagaaatttgttcttttataggaagtgacatgacaacagttctagtaataaaggtgaaataaatggttaagcaacataaaactgatgaattaagtgaggatcagtcctgtatatttcattgtccatttactcataactttattttcctctactagaagcataccagtgaaacactatcatttcatactgaatacatttgtgcatttatgttctggtttttctttccacagaggaattgaaggatgtttgttataattgctatcataaatattttattctttggatttgcatcccttatctaaataaaaatacggaaagtttaaagtagttagattaatatgttgaaagatgcaataaataagtgaatgtttcaaatgatttttataaaactaagtttttgggttattaaaactctcagtgtggccgggcactgtggctcatgcctgtaatcccagcactttggggggccgaggtgggtggatcacctgagatcaggagtttgagaccagcctgacccatataacgaaaccccatctctactgaaaatataaaattagtgggacgtggtggcacatgcctataatctcagctacacaggaggctgaggcaggagaattgcttgaatctgggaggtggaggttgcagtgaaatgagatcacgccattgcctgccagcctggtcaacaagagcaaaactccatctccaaacaacaacaacagcaacaaaccaaacaacaacaacaacaaaccaaacaacaacagcaacagaaaactcttaatgatataacacaaatagtgaggatgatgaagatggtgatggtgatgatgaggatgatgttaatgatcatagctaaaacttactaagcgcttgtcatatgcgaaacattgttccatgcactttctatgtgttatctcttaattttacactaatcattctaggtaagttggctagtatgttaaagataaagaactttaggcacagccatgttaaatgacttgtccagataacttgaaaagtattttatgtctggaagggaactaaagttacctgttcttctgcttcttcccccatcccccttagagacaagtcccaaatcagctcaggtttctaaactagaaatccagagttatgacttaggtctcctgactcctagatcaggttaaaaataagcatgctttaaagccaaaaagctgttatttaatctatctaaagtgtttaaattgccttttcaactctttggatgtaaacatattgttatccagggttactgtactgctatggaataaggtgtatatagggtaaggtaggctttggtgaggcatgggcactgaaggcaaattgtcagccaaaaagtgtgctgactttagtgcagcattttatttggaaatagtgaaagaataaaagaaacctatgatctcctaaactgtggtgaaggcatatttttaacgaagaaataatatgtcaagttttgctttaattggctctctatgtaaatgccttttgcatcatatggagtgtcttaagtagttacatgctaaatgtaagtaatgtgttaatataagtgctagagaagagttggtatagatgggcttattaaaatttctatcacctgttaatattccttaaggcactaccttggaaatgtattagttggtattattagctggtaatttagaagggtacaccaaagagtcatttattttatagtgccatttgctttcaaaattatcttaccacattttaaaaagttagatatttaaaaaatacagaaatatacatgtaaaaatataacccacacctccatactatcagtgggagttaatccaggttatttttttcttaatttataaaactttactggcacatgggaagttccctttctacttcttttcaatgctatatttttcttatgtcctccttgagagtaaacctctgttataaatttggagctatgttcctccactctctgttattaaaccttaacatcttatgttcatacccataaacaatatacatttaaaaatgtataaatggaaacatacttaatatctttctacaacttattttttcccacttatgttttaaatctgtctgttttaatatgtttagatatagttcattcagtttaattgagatttctttgtatttatctccctggaagaaatggaattatgggttgtatgttgtgcttttaaaaaacttcattagatagtgctaaaatgctctttaaagtggatgtaaaaatttattcttccaccagcatatagagaggtctcatgattttcccacattcttagcaatatgtgagagtaatagatttttcaaattgcttacttccctcaatttttagttgcttttcatttaaaaaaaatcaaattactgtaaatctttaattttcttgctaaccacataacgttatctacttcttatagagcagcatttttgttgtgataaatgtacatcaacaatgtttaacaaaactatattaaacatgctatattctcagttaataggattatacttgataattgtttcaagaataaaatcactgtatctgttcagagtaacttattccagttaattcaatgacctgcattcaatcccagctatagtctgagtaaattatatgattatatattataaatacacacatacataagatgttatttttttacatacatatattgtctatctgtaatctatctgtctttagtttatagtgaacaacataaaagcacctccagagtatctattttgtcctgcttgtatactttgtcactcatgactgctcttcaaatcattgcatttagccctgaagataagttcacagcttgaacttttcatttagataattggtgcttgtttttactactgagttgtcctcattcaactgggtaatggaactggaaattacttcctttaagaatcttatttaagtgaagacaaaccataaacatagaagtactttgcttgaaagcagcaacacaaatataagatagcccttgactttagataaaaatgtcatatctaaggtggaacttttagtatggcacaagaaggagctacactaaaagttccatctcagatatagaaagatcagcaaattctgatctttagatcagaattttcaaagacaagatcagcaaattctctcctcaaaaagtaactataaaattggacagattgtcaaaaacaaccatttcataactggaaatctaccaaagacaacaaagtgagaagtgtgaattcatgaaaaattattgaacattgtgtaaatacagtgagaatcagtctcattcttgcctggggctattccctttcctctcagtttgaatggtgcagtaattttaccattatggggaaggccaggaaaaccagaagcttcaccgctggaggtgcctctcttttctgagtggaaggtgaaaagtccaatgctcagcagtgttgtcagtaaaattagtgattttgatgacaaggcaccagtgaaggccaatagttctgctagtctgagatcatcatcatggctgcagcaagcagaagacaagtgaactagacagaaatttaacggtgagatccaaaaaatgaggtagccgtaggagggcttgttatacttttttgcatcttcaattaactggaagtctgtaaatgtgcatgggagactgaacaaggtctagacttttcacatatctgaaaagtggtggtctgcatgcacaggtaaaaagcaagagggcctgatggaaagtaaaacctggagtgtccctgaaaacttctgaacttttaatgtgctctctaaccagcactcatatacttggaaagaaggttgaaggctttcttggataaaagtgtttgagcacagcttatgacatataactgcctgaccattaatctatggaaacatggggctagtgcagaagaagtgaatcttaaaaattaaaacagaattaaaaaaattaaatataagcataagtagtaacacactgcaagtgagacatatttcctagatttagtccaggaaagttgctaaacaaataaacagcaataactacaaccccaaggagggaagtatttgaatctggagtgtttatgatacatttttgattgaaatgttcactttcaacaaaattatgagaaagggaaagaaatggaaaaatacagccataatcagtaaaaaggaaaaattagagagtgtttgtgagtttacctggatgatgcatttaaaagacaaaggtttcaaaggagctattatattatgttcaaagaattaaagaaaaacaagtttaaacaattgaagaattgaatgacagcatgatggcacttgtttaataactagatcttgataaagatagtttttatttttaaaactatttaaaaaaacaaaaggaaattctctctttggagagcataatatctaaaatgaaaactttactagaggggcttaacagcagctctgagatggtagaagaaagagtaaataaattggagaatccatcaatagatatatgtaccattagttctgttcctctagagaaccctgactaacaaaatgatcatcctgaagacacacagtcatcagattttccatggtcaaaataaaagaaaaaaatgttaaagtcagctagatataaggggcaagccacctacaaagcgaaccccatccggctcacagtgagcctttctgtagaaatcctacaagccagaagagaatggaggcccatatttaacatttttaaataaaataaattccaaccaagaattttttatctgcttaaactaagcttcataagtgaaggagaaatatggtccttttcagacaagcaaatgctaagggaattcattaccaccagacctgacttacaagagatccttgaaggagtgctaaatatagaaaggagagtttctgtggtcaccacaaaaacacacttaagtacatatatcattcacacaataaagccacagcaaaatcatgtctgcatgttaaccagctaatgacatgatgacaggatcaaatctgcccatatcaatattgaccttgaacgcaaatgggctaaatgcccaaataaaagacacagagtgggcagttggataaaggagcaagactcaacttgctcaaagtaaagggatggtggaaaatctaccaagtaaatagaaaaagataatgagacaggtgttgctattataatttcagaaaaaaaaaacagaccttaaaccaacaaagataaaaaaaaaaaaaaaggacaaaaaaatggcattacatgatggtaaagggctcaattcaacaagaggaccaaacctaaatatatatgcaccaaacatagaagcacccagattcatgaaaaagttcctagagacctaagaagatacttagataaccacaaaatagtagtgggagacaccccactgacggaattagacagatcatcgaggcagaaaactaacaaagatattcaggctctgaagtcaacacttatccaaatggacctcgcagatatctacaaaactcattacccaaatataagagaatatagattcttctcacctacacatggcatatactcaaaattgataatcacctataaaacaatcctcagcaaatgcaaaagaattgaaatcataccaaacacactctcaggccacagcgtgataaaagtagaagtcgtactaagacaatcaataaaaaccatacaattacatggaaattaaacaacctgctctggaatgacttttgggtgaacaataaaattaagacaagtcaaattctttgaaactaacgagaaaaaatttacaacataccagattctctgggacatggttaaagcagcataaagaggaaagtttatagcaccaaacacccacatcaaaaagttagaaagatctcaagttaggcacccaacatcacacctagaggtactagaaaactaagagcaaaccaaccccaaagctatcgaagacaagataaccaaaatcatagctgaactgaaggaaattgagacaagaaaaaccattcaaaagatcaacaaatccaggcactgattatttgaaagaataaataaggttgatagaccatagctagactactaaaaagaaaaaagggagaaggtccagataaacacaatcagaaatgacaaagaggacattatcactgactccatagaaaggcaaaaaccctcggacctactattatgaacacccctatgaacacagaccagaaaacctagcataaatgggtaaatacctgtaaacataaaacctcccaagattgaagcaggaataaattgaatcccagcgtggaacaataaaaagttctgaaattgaatcagtaattaaagcctaccaaccagaaaaagcctaggaccagatgtatttactggtaaattttaccagatgtacaaggaaaagctagtaccattcctactgaacatattccaaaaaattgaggaggagggattcctccctaactcattttatggggccagcatcattctgataccaaaacctggcagaaacacaatagaaaaagagaactgcaggctaatatacttgataaacatagatgcaaaaatcctcaacaaaatactagcaaaccgaatccagcagcacatcaaacatctaatccaccatgaccaagtaggctttatgcaagattgtttcaacacatgcaaatcaataaatgtgattcatcacataaacagaactgaaaacaaaaaacacatgatcatctcaatagaggcagaaaaatctttcagtaaaattaaacatcatgttaaaacctctcaacaaactaggcattgaagaaacatacctcaaaatagtaagagccatctatgacaaacccagagccaacatcatacagaatgtgcaaaagctggaatcattccccttgaaaactggagcaagacaagaatgctcactctcactactgctattcaacatagtactaaaagccctagccagagcaatcaagcaagacaaaaaaatacaaggcatccaaataagaaaagaagatgtcaaaatatttctgtttgcagacaatatgattttctacctagaaaaccccgtaatttctgcccaaaagctcctaaatctgataaacaacttcagcaaagtttcagaatacaaaatcaatgtacaaaagtcagtagcaattctatgcacaaacaacatccaagctgagtgttaaatcaacaatgcaaccccatttacaatagccacacacacaaaataaaatacctaggaatagagctaactaagaaggcgaaaaatctccacaaggagaagtacaaaacgttgctgaaagaaatcagagttgacacaaacaaatggaaaaacattccatcatcatggataggaagaatcaatattgttaaaatggccatactgcccagtgcaatttacagattcaatgctattcctatcaaactatcaatgccacttttcacagaattagagaaaaactattctaaaattcatatgcaaccaaaaaattgccttagtggacaaagcaatccaaagcaaaatgtacaaagctggaagcatcagattacctaacttcaaagtataatacagaggaataataaccaaagtggcatagttctggtacaaaaacagacatataaaccaatggaacagaatagagagcatagaaataaagccccacacttacagctatctgatctttgacaaagttgacaaaagtaagcaatgaagaaaggactccctatgcaataaatggtcctaggataactggttagtcatatgcagtagattgaaactggaccccttcattacaccatgtacaaaaatcaacttaagatggatcaaagacttaaatgtaaaactgcaaactataaaaaccctggaagataacctaggaaacaccattatggacataggacctggcaaagatttcatgatgaagataccaaaggcaaatagcaacaaaagcaaaaattgataaatgggacctaaattaaagagcttctgcacagcaaaggaaactatcgaaagagtaaacagataacctacagaatgggaaaaaatatttgcaaactagacatctatattagtccgttttcatgcagctgataaagacataactgagactgggaagaaaaggaggtttaattggacttacagttccacatggctggggaggcctcagaatcatggcaggagatgaaaggcacatcttacatggtggtggcaaaggaaaatcaggaagaagcaaaagcagaagactctgataaacccatcagatcttgtgatacttattcactatcataagaatagcatgggaaagactgccccccatgattcagttatgtccccctggatgcctcccacaacacatggaaattctggggaaataattcaagttgagatttgtgtggggacacagccaaaccatatcattccacccctggcccttccaaatcttatgtcctcacatttcaaaaccaatcatgccttcacaacagtttcctaaagtcttaactcatttcagcactaacccaaaagtccacagtccaaagtctcatctgagacaaggcaagtcccttccacctgtgagcctgtaaagtcacaagcaagctagttacttcctagctacaatgagggtacaggtattgggtaatgacagccattccaaatgggataaattggctaaaacaaaggggctagagagcccatgcaagtccaaaatccagtggggcagtcaaattttaaagctccaaaatgatctccttgtctccatgtctcacttatagattatgctgatgctaaaggtaggttcccatggtcttgggcagcttcacccctgtggctttgcagggtacagccttcctcctgtctgctttcatgggctggcattcagtgtctgtggcttttccaggttcacagtgcaagcagtggatataccattctggggtctggaggatggtggccctattctcacagctccagtaggatatgccccagtagggactctgtgtgcgggctctgactccacatttcctttccacactgctctagcagaggttctccatgagggccctgcccctgcagcaaacttttgcctgggcatccaggcatttctgtacaccttctgaaatctaggtggagatttccaaacccaattcttgacttctgtgcacccacacactcaacaccatgtggaagctgccaaggcttggggcttccaccctctgaagccacggtctgagctctacattgtcccctttctgccatggctggagcatctgggacacagggcaccaagtccctaggctgcacggggacccttggcctggcgcacaaaaccactttttcctcctgggcctgcaggcctgtgatgtgaggggctgctgggaaggtctctgacatggcctggagatatttccccatggtctttggaagtaacattaggctctttgctacttacacaaatttctgcagctgacttgaatttcttctcaaaaaaatggggttttctttcctactccattgtcaggctgcaaattttctgaactgttatggtctgtttcccttttaaaatggaatgcttttaacagcatccaagtcaccttttgaatactttgctgcttagaaatttcttctgccagataccctaaatcacctccctcaagttcaaagttccacaaatctcgagggtggggcaaaatgccaccagtctctttgctaaaacataacaagagtcacctttgctctagttcctaatgagttcctcatctccatctgagaccacctcaggctgcaccttattgttcatatcactattagcatttttgttaaacccattcaacaagtttctaggaggttccaaactttcccacattttcttatcttcttttgagccctccaaactgttccaacctctgcctgttacccagttccaaaatcccttccacattttcgagtatcttttcagcaacgcccactctactggtactaatttactgtattaatctgttttcatgcagctgataaagacatgcctgacacttggaagaaaaagaggtttaactggagttatacttccacatgtctggggaggcctcagcaacatggtgggaggtgaaatttgctttttacatggtggtggcaagagaaaaatgaggaagaagcaaaagcagaaacccctgagaaacccctgataaaagcctctgataaaagtctcagatcttatgagactttttcactatcacaagaatagcatgggaacgacgggcccccatgattcaattacatcaccctggatccctcccacacctgggaattctgggaaatacaattcaagttgagatttgggtggggcacagccaaaccatatcagtatctgagtaaggtctaatatgcagaatctttaaggaacttaaactaatttacaagcataaaaccccaataaaaagtgggcaaaggatgtgagcagaaactattcaaagacatacatgcagccaacatgtatatgaaaaaaagtgctcaacaccactaatcattgtagaattgcaaatcaaacccacaatgaaatactatttcacatcagtcagaatggctattattaaaaagtcaaaaaataacatgttgctgagattgtggagaaaaggaaatgcttatacactgctggtgggaatgtaaattagttcagccatggtgaaaagcagtttagtgatttcttaaagaacttataacagaactaccagtagacccagcaatcccattattaggtatatgcccaaaggaacataaaacattccaccataaggacacatgcatgcatatgttcctcacagcactattcacaatagcaagaacatggaatcaacctaaatgtccattaatggtagattggataaaaagaatgtggtatatatacagcatggaacactatgtagccataaaaaggaacaagatcatgtcctttgcagcaatatggagtgggaggcccttatcctacacaaactaacacaggaacagaaaaccaaatactgcatgttctcatttctaagtgggagtgaaaaattgagtatacatgcacacaaagaagggaaaaatagactccaaggtatatttaagggtggagagtgggagaagggtgaggatcaaaaaacttcctatcaggtactatgtttattacctgggcaatgaaataatctcttcaccaaacctctgtgatgcaccatttacctaaataacaaacttccacatgtacccctgaacctaaaataaaagtttaagaaagaacttatatttacctacacagctacagtgcaatagatgggagagaaaataaactataatagaacaaaatttttgtactttatagcaggggtccccaacccccaggctgcagaccagtgccagacagcggcctgttaagagcctgggacacacagcaggaggtgagtggcaggtgagcaggcattaccacctgagctccacctcctggcagatcaaggcattagattctcacaggagcgcaaactattgtgaacagtgcatgcaacggatctaggttgcaggcttcttatgagattctaactaatgcctgatctgaggtggagcagttttgtgtggaaaccctccccccacctccatctccaatctccgcattggtaaaattgtcttccatcttccatgaaactggttcctggtaccaaaatgttggggactgctgctttataggaattaagttactgttaatctcaggcagattatgatgtcactaaattagattagttgctaagaaaatgacaagtaaatgtagcaatatatcaagatatattaatatgttaaactaaatatttttacttagcacaaaaaaaggcagaaaaggaggaacagagaaacaaatgaataaacaagacatgaatcaaatggcaagtgtaaattcagccatatcaggtcaggagtggtggctcacacctgtaatcccagctttttggagtctgaggtgggtgaattacttgagctcaggagtttgagaccagcctggccaacatggtgaaaccctgtctctaccaaaaaatacacaaattagctgggtgtggtggcatagcctgtagtcccagctacttgagaggctaaggaaggaggataacttgatcctgggaggtggcggttgcagagagcagtggtgacaccactgcactctagcctgggtgacagagttagatcttgtctcaagaagtaataataacaaaaataaataaataaatccaactatattaataattacattacatgtgaatgggctgagaactcacgttcgaaggcagagattgtcatcctgaataaaaaaatcaggatccaactatgtgctgtgtaggagaggcacataatagattaaaaaacacaaataggtagaaagtaaaagaatggaaaaagacaaaaatccactatctaaacagtcaccataaaagaactggagcggctatttttatattagacaacatagacattaagacaagaatattactagtgacagagaaggatattacctaatgataaatggccaatatattttaaagacataacaattataagtgtatacacacttaacaagatagccccaaactaagtaaagcacaaatataattaaaaagagaaatacagaattcaataataattgttggataatttaattcctaaatctgaaaattaatatagaatactgggcaaaaatcagaaagtatacagaaaatctgatcaacattttcaacaatcttggcaactcaaattatatattactccatagattgacaagataataaccattctttcaaaatacatgtagatcacccttcacaatagcccatatactagaccctaaaacaaatctcagtaataaggtctcaaatcaaatgaacacattaggatcaaattagtaatcaacaaaataaaataatggggaaattgccagatattgtaaaattataaacatttttaggtaactcatgagtcagagaattaatcacaaggtaaaatagaaaatattttgatctaaatgaagataaaaacacaaaatgtaattgatatgattaaaccagtgcttagagaaatttatagcttgaaacaccttatatatcagtaaagaaaaaaattcaaatcaataatttgtctgcccctaagaaactaggtaaaaggcatgaatttaacccaaatcaagtacaaggaatgcaacgatacagactagtatgaattagaaccataaaataggatacagaacagtaatagggataattaataaaaccaaaatttgaaaagataaaattgttaaactttagttagagtaatcaagaaaataaatgaccgaagacagaaactgacaaaattaggaatgaaaaagggacatagaatcctatggaaattaaataggctataaaggacattatgaatatataagttttgatgaaatggaaaaattcctaaaaagacagaaattactaaatctaacacaagaagaaatagaaaatttgaataaactcataacaattaaagattgacttagtaattataaatcctctttcaaataaattcccaggtccagatgccttactggttatttatatcaaatatgtaaaggaaaaattttaccaattcttcacaaacttcacatcccaactcattctgccatgttttattattgtgctcccaaaggcagagaaagacgttacagaaaagaaaatcacagaccaaaatctctcaacaaaatattagaaaccaaatctatcagcatattaaaaaaagatgatatactatgattaaatgggacttatctcagcattcaagtttagtttaaaatccaaaaatcaatttatttgatacaatatattagtagaataaaagacaaaaaacatgttattatttcattagacacagaaaaagttttaaaaaatccaacacccattaacaacaacaacaacaaaaatctctcagcaaacttggaagactagggaacttcctcaacccaataaaagacacctgccaaaaacctacaattaatgtcatatttactagtaaaagactaaattctttcctcctaaaattagaaatgaagattttcaccttttccccctttttattcaacatttaataagattttagtgggtgcaataagttaggagtcaactaactatatcctatggatccaatctggtctgtcactgtttttgtaaatatttactttgtatcttggttaaacccttttgtttacatagtggcgtttgcaatacagcagctaagttgaacagcaaagtagttgtgatagagaatgtatggtttgcaaaaacaaaaatactaactacctggccctttatataaaaagtggactgactcataaagcaagtaacgtttgaggttggtactaaatacattgaaaaggaagaaataaaactgtctttattctcagatgatatgatgtcttatgtagaaaaccactcaaataatgactataactgattaacatgtttagcagggtcttggaatacgagatcaatataaaaaaatttagtgcattttgttcaaggcaatgaacaaagtttcctgagaatattagtgttccatgctttggtgtcagccgccatcctctaatggcagctcctttgactcatgcagccccagctcctgaaacagttgtgtaaacccctgattcctaaattaaatccttacagaacatatttatagagtggttcttattctaccaactgaatcctgatagatacatcaagaaacctgaattttattctaagtacaatagggagattttgaagaatttaagaataaactgatttatggttttataatattactctttttatacgcagtcaagatccttgcttttgaagccttactggtatgcagactctatttttaactaggtgttggcacattctgtatctttggatattggttctgattcattgatttggcgtcttgggtgttatctctgtcttggcttgagaccctggatttcagactcatttcaaccaatcattttgtatttgattttagatctaccttttctggtccagctcctcaatgagttttgcctaccacttttcgtgaccaaattctaatatacacagaaattatgaaataattttttttcttatgcaaaacttagttcctttggacctggtaaaaaccttgttttctagaaaatacattatttcttaaggacaagaatttttatgatatgccatttcatctgagatattattacatgtgtaactatgtctgccactaatcaatacaaacacaataaaaatgacagttttaaaatatgattatttttgagccactttgataagtcaaaggatctttgagtcatgatagaccttgagtttatctaatactttttcagaaaaaaaacttcctataattagaaaggagaatgatagtaataaaacaatcagatttattttcatttcaggagtaaattagaaattcttataataaatatagtattaatatcacagagatctggaggaccattatcatagtcttcatttacagatagtacttagtagttgtaggctgtatttacagtaatcaattagatttgtactgttctaaatctatatacagtaccatttgtcataagaaatcatactgagtcccaaatcagttgatcttaaaatggagcgattactcatgtgggtcagatttaatcaattgagctctttaaaagcagagccttttctttggctagtcacagaagatgaaattagagatacaaagcatgaaaggatttgacccatagctgttgacttggaggtgaaagaggttatgtggcgaggaatgttggcaggttcagggagctgagaatggctctagctgatagcaagcaagaaaatgggtcctgactcctacaacagcaaggaggtgaattttgtctacacaaagaatgaccatgaaatgagatttttcccagatcctcagacaagtactcagtctggctgataccttgatttcagccttgtgacattctgagcagagaacctgaccatgctgagagggacctctgacttacagaactgtgaactaataaatgggtgctgttataagcctttaagtttgtgataatttgttacacagcacaaaatctaacacattgtttaaataggaatgacaattaccatttcattttactttttcagagtgaggtatgaaataatttcatgattatgaaccttggatgaactatgaactttaaatcaaaatgttctgtactacattttgttaatcaagggcaaaaggggaaatgtaaacacatttaatatctcaacctttttttcagggcagtacattgacattctgttcccctgggaaatctaatttaatgaaatgaccttgaaatcagccctgaaaaatatgtatttcagtcaaagcttaatacatagactcagagtttggtcatttatttattagagaataattatggctaccagaataggaaatactcttcctattaggtctaaaaataattgtaagagcttaactgttctcatggatatgacaacatcaatctcattaaccgctgcaacttaccacactagggtgcatagcactgatttttcagccagggtctatggtggtgactttgacaggcattactcacgatgactgatatgagtcataggactatgactgatagagaacactcccagaacgtttctgcatggatccataaagctgttgttcttgccaaacacgttttcaatttaaatttggaggtgattcatttgaattactgcataaataccaaagatctcagagaagagagcactagcatgggaaagcatgggcctgtctacaatctaattctgtctcaatcaaagtaacagttcaaatttagtctcaatcaaggcaaccttcaatgattagaactcatttccaggaccatgaagttttggtttcctgggctgatttttacatcaaattgctttgtgaccttgagcaagtttttaaatctctttcctttttctaaaatagtaacaacaaaattggaatgtccgaaactctttcctgaagtgttcaggaaattacttttttgtaaacagcattgagagactcagagtgatgggacaaaaagccaaatctcataaacaagataaacagctcatcaaatatttttaacttatagtgttaaatcagaactgaaaaagaaaattcttggcaataaatggtgaaggtatttcttagaatgaaggtacaaaagtaccaagagagtacctaacaggaatcatagcccactttcaacttttaaagccttttataaaaatgttcaagcataaatttctcaagtagaggaatgatataataaacctcaagcacccataaatcacattaataattaccaacttatttcaaatcttgttggagttgaaattctcaagtagagcgatgatataataaacctcaagtaccccaaaaccacattaataattatcaacttatttcaaatcttgttggagttatgttatcccagatcattttgaagaaaatccctgcatcatataatttcacattagagtctaagcattcaggtaaaatataatatattttcaaatatatttcaaaaaagttcaaatatatttcaaaaacatgcaatcccaagagattcttttgaaatacaaaaaatagccaaataggcagtagtgaagttttctttaacatttacaacgtagaattatataaggaatactgttaaagaaaaaaactgtttcaaagcaagaattaataattcttattccaaatattgcaggaaaaatgtaatgcttttattaaaatttaacaagagacttttaattactttaaagttcatttttagcatctgtttcttggatcacacgtcagttttcttgcttgtgactgctccttacttaatttaacaactctaagcatataggtcttttaaaatcatcatagtcttaaagtaaatgcatcctgtgtatgtagatagtagaagccatccaatttctacgttgtattaaaatgttcatagtacttgtttgggtgacgtttctatccttaatatagcatatttaaaaatggttttaattaaacaattagttactgaatttctatccatttaaatatgctctttgtctcgatgtcagtttaaatctttttcttacatgtggggacattattaagatttccaaaatatacattcaaatcaacataaaaatacccagaaattttatgaaaagtagactactctaggggagcttgctgtctcatgaaataatgccaaaatagtatttaaactagaggacagatctgtcaagattaaactagcaaaatcacatgaaaggggaatcaaatctgggttaatggaggaattaattgtttttaaagtcttctacaacagttctacttactgcatgggagagagttagagcagctggcctgcaatctatcttgcacaggtgcaaagaagaaaatcttttgaaaaaaaaaaagaaacaggtgacctgacctaatctcaattggacctatgaataaatatacaaatacttttttttatctcttaaatgcccttaacaggatgttcttggttaaagattatagtaagtagaacccaggatctaagacatggcttcctggataatagcacaaaggcttttcaacactctggagtgaaaaactggacatattttatgatataaacccttttgctatgtcaggaactctctgaatctcatgtattctgggctggtggttcacgttctagaagagaaggaagaacctggggagttgcgtttgattatttagacttccatttgctttgctggaaccccttgattttacatagacttaaaattatttactaaagcatgctactgggtatgatttctgattgctgtgagtttgtcttgataatccaatattatggattagttcatttttctccagaatggggcaagatgtgtcagtgcatgcaaaagaattcaacgcacatattcaaatcatttacttgcttaaaatgccactacttttaggttaactcaatttcttttttggtaaatactcaggctttcggatatccttttcttcccagttcttctccctggacaacacatctctcctgcccgtgtttcttacagcttcatcttgtatactgctcagccttcaggtgaaagggctcactttcctgaggctggttctcatgttctgctcttattttgtggttaaacaatggcgattttccttactccccttcaaccacagcagcgtggctcacgaaaggtaaataggaacaattctcagaacatcgtagtatatggctgttatgggttgaatgtttttgtacccttcgaaactaatgttgaaacttaatccccagtgcagcagtgttcggaggtggggcctaataggaggtgtttatatcctgagagtcctcgggatataacataaaccatgtacgtacaacgttacctgaaaatcaattcggtttaaaaaatacttggtcccctctagctgccctcttgcatccccacgtgcgtgcgcctactctcagcgggtccaccagactccctgagcatcatcctaattccccacctagacccttactggctccgagaagatgaaagacgcaattatgaaccaagaaaaactcgccaaactgcaggcataagtgcgtattggtgggaaaggaactgctcgcagaaagaagaaggttcatagaacagccacaacagatgacaagaaaaaactttagttctccttaaagaagttagggataaacaatatctctggtattgaagaggtgaatatgtttacaaaccaaggaacagtgatccactttaacaaccctgaagtttgggcatctctgtcagggaaggctttccccattacaggccacgctgagacaaagcagttgacagaaatgctacccagcatcttaaaccagcttggtacagacagactgactaggtaagggagactgcctgaagatctgtccaaacaacctgttgggggaaaagcaccacttgctactggagaggatgacagtgatgaagtttcacatcttgtggagaattttgatgaggcttccaagaatgagtcaaactgaattgagtcaattcctgaagaaggtgaaactcgcagaagttactgggagctgctattttattatgactgctttaaaaaaattgtttatggatcggataaaatctagaccttgaatatttttaagtccaagcctcttggacactgcagcgtttttcatttttgcttatacacaattcattctttgcagctagtgaagtcgaagaaacctggggataaagtttgaaacaaaggttaaaaaaattatttgctggaacatagccagattcagacatttctcctttaaacaatataaatgaattttagaaaacaataacacatacatttgaaatttcgaacaaaagtgaatagtatgagataaaattatgttcagaattatttagtatttaagtcagatgttacactcctattgcagtgtttatacttcaaaaccatggaaagtagactcgtgtaggggagcttgctgcctcatgaaataatgccaaaatagcatttcaactagaagacagatcattgacaagattaaactagcaaaatcacaggaaatgggagtcaaatccatgtttgtgcgtttagttttgccctctaataccacctcacgtgttctggtaatagtttcctatctagatgtagctattttagatcagtattttatttctgctcttgtgacctcaatgttttggctcctttgatttcttcttgggaattgcagaaagatgaaagacgaatcctcttatttgcttgagatttagataatcaactgttaaagctgtactgcccttgttacaaattcctataactgaactttacttttttcgtaaactctctctttccataatatatgcatcctaatggattgtgcactgtttagtctggactatttctttcagaatccacttgtagatatcacatcacactgtacattctcatctcctacttgtatttttttgctctttctgccaaacacacctttctcatattattgaagtctattgctattgggctttttctttctctgtgttcttatcttctacactaaaagctatttttactctttgttttgctattctacagttggtgcctaaaggcctttaagaataagaaacaatcagtttttcgtagatgatctaagaaaaccacaatccttggttttatagcattttgcctttaatctttttttcatttgaattgagctatagaaactcacattctttaaaatcagatggattcaataggaaggaagtatcccctcctatcaggttttgtttttagatcatccattaatggaatgaattgctttccttttgtactttctgcctccatctctgtcctcatcaatctggagtgctgctagattaatttttctatgaattggatatgattttcacattcatgctcagaaacaaagcagcttctacaaactgagagaataaaattcacatcccctggcttgccattcatggctctatacctaccttacagtgaccttaaccatatctgtccttccagtgttatttttcccttctctctttcatgtacccgttccctgcattgcttgctcttctttgtacacgatgtactctttaacaccagggactcagattacattgttggcttctacatgtactgttttttttttcttatcatctcttaatgaatcatttcctctttattcttcaggatttattttagagatccctgccttcctaagcctggaatactcacctctactatttgcagactctgaaaataaactgtcctcattctgaaaactggtggcacttcttaaattctaccttaaacttaatcacttgttgattaattaaaaattattgagaatctaacctgcgttaaacacagttttaggctctagggatacagcagtgaacaaagtagataacaatttctgcccttatagagtttatcttacagtgttacagcttcctaggagagttttaaaacattgatttataattactcacactggtaagtgaagacagaaaaacaagtgtcaggatatttatgtactcaatgttttacaaaagcaaaaaataaattagttcttattaaaaaatgctgccaaaatgactgaaaatgtgatagttcttggtatcactctattttgatgcactgagaaatacagttgcacttgggacattgataaataagtgctgctttaggaaagatgaattagtgaagcacaagttctcatttgtgaagacaggagctagagagaaacaccataaaacgactgccaaactcagcaggaagacttaccatgtctggtgagcatcctgctgtttcagattattctgtgaggcttgactcagttcctcagcttcccctgatcaggtagttgaggtgaggtcccagtgatgttcttatcatgacccaagtggagtcacgatattatctttattgcaaaaccacttctcttcttgctctactatcaatgaaaaagttactggatgctgctacttctcttttttgttgacagcaagcccaacgtataaacatctttctcaagaacttgtgtaaggattgaaataaactctcccttctgcttttcccttaagagtccatcaggatcatctatttattcaggtctatcatgaagttatattaataataacagtcaagatttcacttggctcatgtgggatcttgtattgtttgaaaagactcatctccatctataattttctgggggctcccaatgaatgttttatatattttcattgacagatagactggatgatcacatgttatggagtgggcagtcttgtcatgtctactaaattgtactgtattttctggatcctgttgtgctctttggaacgacttttgtttcttctgagcaacgaaatgcccaccaggcgctactgttgatgattgttacatccctggataccaccaaacactccaggcaagatgtccctgtcaggccagctgctgttttccactgggcaccaaagacttctatccggcaacattatcatttttgtcttttcccactgggcaccaaaacagataaactggagtcttcatgcaaccaaaactactcagtggtctagggagaaataaaataaatattgtctcctctttcaatgttttattctgttgcaggtagggactggcgaagaggaggctttttgctctggtacatttccagaatagtttagttatattattttttttaaaaattttttctgttttcccatttgtttcccttccttcctccactcctccctttattcactttattctctctctctctctctgcaaactgttcacccgctcttttcctaagaattgaatactagtcttctgggtgtaattagatagagctggttaggtcttctttctcttgtaatataagtcatttcatagacttctatctcaagtgaaaagatcatggaggtcaaactcaattcaacagataagctatgaaatgttctatagtataataagcactcagaatgtaactgttgaatgaaagaataaaatctgttttattacttacacaaatctcagtttaaatgtagcctgaaatcactgtacagttattttggcacatcatttatttcctctaaagtccttagaaataagtgtttgcttttatttaactttgcaccaagcctcctattttaatattttgtatgtaattgcctaaatatcttttggagtaatgaatatttcctttatagttgcactaaaatacataggtgtggtgtgtatcatatagtaaaatataattaataactggtatgtagcctaaagaatcacatttgggtagccttagtattgcttgcatattgtaatttaagttttgctaaatgattatctttaatcttaagggctaaaaacctgtcctttgtagtctcatagcttaaaattttctgcttgaataaattgctaggagtagacattttgcaaaatgtgtttatgtgatttctctcaaaatgaaggactttttaaaaaacaaatgaaacaaagcaggtagtgtcacaaaagtcaatgtaacacaaagcgataatcacagaatattatcaatgttttaagaaaaaaaagaaatttgtccaagatctcatgctaaatattatttatgttctgtctttggtatgattaactatttatatgctacaaatacatattttaacatttttctcctcttgtagcaataggtcattgcttggcatatttcatctaataataggtgaatagtttcaggataggctgtaagatcagcaataaggatgacttaaaggaagatgttcgtttagtgacagaagacgctaaaagtaattttaaattgtagaaaaaatggtgcccagaaaaaggctgagttgtgtacctgaagctgcagttatactggcaatttaggatgaaacaatttgaggtgagacaggagtaacaatgttaacatgattgttcatagtcataatgtaagtggcattatgatggtactagacaactggagtgccttggttagtcttatgtatctaaacaggatattcatgctaatgttaagatcagaggttttaaatgtagaaactaattttcttttaaggcttacacacttaccaagtaggcattaataaaaaaattagtgaatatatgatgtacaatttccctagttcagaaaatagcactgtcatgtgctagttacttaggtcagaagaaagtgaattttatcttaaatatcaatccgtcaataaagccactttatatagttcctcaatattttataaatctttctacttctttcatcaaaaccactgtagtccaagttgccacagttttcatctgaactaaagaatagtcattaaacttattttcctcatacctttactctctactccaatcaggtttttttttttttttttgcagtacagttagtgagcttttcaaagggaaaacctcataatatcaactctttgcaaataatctgtcaattgtttcccctgctcttagaataaagagaaaattattttaatgctccaacaaggaccaacagaatatggtcactgtttcttcagtattatctagctattgataactccccaaatctgtaattacagctcatcttgtctcataaactccagacacatttccatctgtttaaatggttaaaacggattcattctcctctgcacagattttggagactttgataaattgtgtcatggcattttgcaattttgtttaggttgttccttttcagcattacattgctcataatacttccttgttgtttttaaactatctctaggtttgatatcttgtaatattaaatttattctcagaaattacttcagaatacttttcaagaatgttatggttgaaaattactaatctaatatagtgatctccttgcagagatagtagtagactacaaaatattatcaatgcttatctggagctagataaaaagtaattctgattttcttctcattgtgtgttttcgaaattcactacaataaacacgttttgtttctctaattataatttttaaaaatgagggctcgcaggcctggcgtggtggctcatgcctgtaatcctagcagtttgggaggccgaggcaggtggatcacctgaggtcaggagtttgataccagcctggccaatgtggcaaaacctcgtctctaccaaaaataaaaaatttgctggttgtgttggcacacacctgtaatcccagctactcaggagcttgaggcaagagaatcacttgaaccctggtgggtggaggttgcagtgagccgagatcgcgccactgcactccagcccgggcagtaagagagaaactccttcttaaaaaaaaagagggctcttttgaaaaatcaaggtctgaattaaatacagtattgctagtagaatgaactgttaatacagtaacaactgcaaagtctttacaaaatatgaaaaaacatataaaagcactggaaggcatcctatattagatagaagctggagattatgctcttgaaaaactataactaaacaggataaaagtcgtgaccttgtagctatttttcttgtggtttctcccaaccactatgtctatggcagcagaaaactagtcttacttgctggagatgaccaagacataaacaaacaaaaataaactctactcaaggctggaacagtaactggaactttcagcaagaaatactgcgagactacagaattattgagaacaaaactgagtataaattgcctgaatccctaattgacagctaaactatatgtgtacaggaacaaacctagaaagtttccaaaaccaggcaaatatcaaagaagaaagtcatcttcaaagacagaaagacactcgtcaatatttgtgttttaacttagtcattttccaaattgtgctctcagctgttgccaaatgcagggtatatagagttaatactttgagtccagtctagggaattgcctaatagaaccacaacaacaataaacatagaaaacaacaacaacaacaacaaataacaataaaaaatcttcagaacagattgcaatatctataatgtctagttttcaatgaaaaatcactaaacctgccaagaaacagcaaagtgtgacttacacttaaaaaaaaaaaaagaacaatcaatagaaattgactttgagtggagtcagaaactgcatttagcagatgaaaatatcaaaattttcattataaatgtgctgaacatttaaaggcagacatattcaaataattaaagaaaatttggttccctgggtaaaaagttagaggaaatcaacagagaaattgaaactactgaaaaaatgtatgttagagctgaaaagtacaatacctaaaaggaaacatttatagataggctcaatgatatatttggggtggaaaaaattgtaaacttgaaattagattattacaatttacctaacatgagtaacagatagaggaaaggttttaaaaaaataaacagaggctcaagacctgtgagacaatatcaattagtccaacgtatatgtagtttatttctcaagagacgaggaaggaaagatacaataaaaaatgtgaaattataatggtaaaaatttcaccaaatttggtggaaaagtaaagttcagattcaagaatttttaatgaaaaatcaagtagaatgaaaacaaagaaaaccacacatacacatttcagttaaactactaaaagtcaaaaaaattgagaaaaatcctgaaggcagccagaaaggaataacaaattacatgtatggaaatagtaatacaattaaactgacttattatgtaaactagagtccaggagatattagaaagacatattcaaatggttggaaaaaccttctatctaccaagaataccttatacaatgaatctagcatagcttctgtacaaaattctgaagaaaggtctttaggttgagtgaagaaaaaatacagatgaactcatatccataagaagaaatgaagtttacaggaaataatgaatacattggtaaataaaatactacattttctttttatcttaaattatttaaaagacatggtgacttaaaacaaaaattttaacactaaattattggatttataatacatatagatgtaaaacatgtagaaataataacacaagggatggggtataactgtagataggctgctgcaaatttccaatattatatctgaagtaattaaacattaacactaagaagattatgataaattaaagatagatattgtaagtcttgtcaaacattaaaatataatgtaagaagataaagctaggaagccaagacaggaattgaaatgatgaaaatgaattcaaaataatatagattgagttaaaaagacaaaaaagagaaataaagatcaacaaatcaataaggcaagcagaaaacaaactgaaaaatggcagacctcaataaaccatatcaatatcaataattatattcaaataaaataggcaaaaaattctaatcatacagattttcaagtggatgaaaagcaagaacaagaagctgctatatgcattctgtaacagatacaattagtcacaaagacactaatagagtgaatgtaacaggtggaaaaaacatactacacaaatagtaagtctaggaaaggtagagtgactgtgttaatgtaagtaaaagtctttaagacaagaagagttacaggagacaaagaggaatatttcctaatgattctaggattaatacattaagaaactggaagatgtatatatatatatatatatatatatatatatatatatatatatatatatatcttccgtaataagatatataactgctataataaaatcttctgtggatttgcccctatatttccagacatctgttatcacttaacccattacaagcccgctgccgcagatattcccgtggcgagcgataacccagcgcactatgcggatgccattcgttataatgctcgaacgcctctgcaaggttctttgctgccgttaacccgtctggtttgggcatgatactgatgtagtcacgctttatcgttttcacgaagctctctgctattccgttactctccggactccgcaccgccgtgttcttcggttcaagtcccaacatccgggcgaactggcgtgtttcattagcccggtagcatgaaccattatccgtcagccactccactggagacgacggaagatcgttgccgaagcggcgttccaccgctcccagcatgacgtcctgtactgtttcactgttgaagccgccggtagtgaccgcccagtgcagtgcctcacgatcacagcagtccagcgcgaacgtgacacgcagtctctctccgttatcacagcagaactcgaacccgtcagagcaccatcgctgattgctttctttcacggccactctgcctgtatgtgcccgtttcgatggcggtacagcaggttttcgctcaagcaacagcgcattctggcgcatgatccggtaaacacgtttggcattgatcgcaggcataccatcaagttctgcctgtctgcgaagcagcgcccatacccgacgataaccatacgttggcagctctccgataacatggtgtatacggagaagcacatccgtatcatcagtgtgacgactgcggcggccatccatccagtcatcggttcgtctgagaatgacgtgcaactgcgcacgcgacacccggagacaacggctgactaagcttactccccatccccgggcaataagggcgcgtgcgctatccacttttttgcccgtccatattcaacggcttctttgaggagttcattttccatcgttttcttgccgagcaggcgctggagttctttaatctgcttcatggcggcagcaagttcagaggcaggaacaacctgttctccggcggcgacagcagtaagacttccttcctggtattgcttacgccagagaaataactggctggctgctacaccatgttgccgggcaacgagggagaccgtcatccccggttcaaagctctgctgaacaattgcgatcttttcctgtgtggtacgccgtctgcgtttctccggccctaagacatcaatcatctgttctccaatgactagtctaaaaactagtattaagactatcacttatttaagtgatattggttgtctggagattcagggggccagtctattctgtaataagatatatatatcttttgtaataagatatatatatcttctgtaataagatatataatcatctgtaataggatagatatgtcttctgtaataagatatatatatcttctgtaataagatatagatatcatctgtaataagatatatatgtcttctgtaataagatatatatatcttttgtaataagatatagatatcttctataataagatatagatatcgtatatgtatatgatatatatataatatatatcttattacagaactccgaagtacatgaagcaaaaactgacagacataatggagaaacagaaaaatggacaatggtgattttaacacatctcttccatcatacatatatatatatatataaaaccttgaataatttatatgttatgtatgtatagacacacacatatgtatgtattatatataatttatataattatataaatatataattatatattatataaatatataatttatattatatataacttatatattatataatatataatttatattatatataacttatatattatataatatataatttatattatatataacttatatattatataatatataatttatattatatataacttatatattatattaaatatataatttatattatatataaattatatattatattaaatatataatatataatttataatttatatattatagataaatatataatttatatatacataatgtacattaaatatacattatatgtatatattatattatataaatagatataaaatttatatataaaatttacatattatatatgtatacacatatatgtgtgtattatatatatatgtataatcttgaagaatatatataatcttccagatttttctaggtagacaatcttgttttttacgataaggagcaattatatttctttctagtctgtgtctcttatttatttatttttggttttgtttcattgcactgggtaagactactgataagattttgtatagagtggtgaaagcagaaatccctgtcttttacacaatcacagaggagagaaactttaagtctttttttcactaagcataattttagcagtagttttttgtttgttttttgtttttgtagatgccctttatcaacttgacaatgtttccttctattactagtttgctgagagtattatcatgaagggctgttgaaattgccaaacttcccatgtgccaaaagataataataaagctcttctttttgcttgatatgatgaattgcagtgaactctcattatacatagatctgtatttgtgaatatatctacttgctaaaatttatttgtaagcctcaagtcaaaacttgtggtgcttttgctgcatttgcagacatgcacagaggagtgaaaaatttgagtaacccaatgtgcacatttccagctgaggtcgacaaggctatattctgccttgttttagctgtcatactatgaccaagcatcctttttatggtgtattgattggcacattttttacatgtttgtgcattttgttaattattttgctgtttaaaggggcccccaagcataccaatgaagtactatctagcgttccttacagagagaatacgtgtgttcaagctttcttcaggtatgagttaaggtgctcttggatatgagttcaatgttaattaattaacaatatatattaaataaagtgttttgaaacagaaacacacatccaacagggttatatttgatcagttgttgaaaatgttgtgaccagaaactcagaggaacctaatcttgcatttcttctaggagcaatgattcagtattcgttacttcaatgttgatgtacactttatagaacataactactatgaatgagcatcacttgtatactaactgaagtttgaatgttgaaacattcttacattcttgaaatgaatcccatttggtgattttgtgttactctttttacttcttgttgtatttcatgtgttggtactttatttaaagtttttgtgtgcatgttcccgagggatattattctttagttttcttctttgtaagtttttctgttgtttggaattagggtaacattggcctcataaaatgagcgaggaggcatttccttctcctctatactctggatacatttttggaaaattgtcattatctcttccttaaatattagacaaagtccatcagtaaaaccatataagcctccagtttactttgttggagagtttttaagtatcaatttgattatttagtagatttagaaatattcagtttatctatttctttttcattgatttttgagagttgggagtctttcgaagaattttattatttcatctaagtttttgaaattatggatgtagagttactcatacatagtattattaaccatagtgatagcccctctttgatttccggtattcgtaatttctgtattttctcttttttcttgattggcctcagttttattgatttgttattaaaggaatgagattttagttttatttcttttcttttttttgttctcattgacttctgcttttattttttatttattattttcatttttttccttctacttgctttggatttaattttctctgttatttctatgtttcttaaaatggaatcagaatattgatttgaggtattttctctcacgtaatgtaaacatttaacatatgcattttatatatttaatatataaattctcataaagtgctgctttagtggcatcatccaaattccaccatgctatgtttttactttcattcaattcaaaatattgttaacttccctgttatgttgtctttgacctccatggcctattagaactgtattgtttaatttccaaatatgcagagggattttctaggtatcttctggctactgatttctaattttaatctattattgttacaaaacatgtttcctagggaattgttagagaattgtttgtggatatcaatcatttaattatgttgaggtttggtttttggcctaaaatatggtctttcttgaagaatgtcccatttgcacttgaaaagactatatattcagctattatttagtggcatattctataaatagcaaagaaatgaagctgatttataatgtttttcaggtttactaagtacttactgaatttttgtctatgctttaattttctgttgaaagctcacatcttgtgtaggacaatagaggctgaggtaaatcgactttatgcttggaaattggtaaatgggcatatattttcttttgctagtcctctgttgtggaaggctgagtcaaccagttaggaatgaaatggtggttgggctcttttgttgttatggtaaacccctgaccaccacagacttagaattcctctagcattaccttgtgtttaaggtggggttggtttactacaaggattctctcaatatttgctttatcctctgctctaggtctttcttttgaacttgtgcctcagccggggtctttcttcacccttctttgtccctttccaagcagaagccgtctgtcacttggtgctgctatagtggtggtataggctggaagagaaagacaccctctatggttctggtcaagcctccatcttaagtagacactgtccctggattctggtgggtgggctgtctcgggatttctgctctcctccccctgtaggtttcagcgtggaatttatttttctcctttctcaggggtaaaaggcattttctgttttcttccttcagcagttccagtgccttgcggggaatgtcttcaccagtgctctaaaaggcaacaggattttctgccctgtatccagcagcttaaggcttttgtttcaaaagggaataagagagaaaaatctctcctatcatgcttttcttgcggtactgttgcctgtttttaactttttgtataaatggaatcattcagtatgtacattttgtatctgttttctttcactctacagtatgtttgaaatgtttttatgttgctttgtatatagttttcttcagatttctgaaagtatgaccgacaaataaaaattctatatatttagggcataccatgtgatgtatatatttacatatatatggaggcataggggaatgattaccacaatcaagctaataaacatatccaacacctcccaacatctctcgtagtcactttttatttttttatttttatttttttggtgaaaacacttgtgatctagtctcttaaaatattccaccagttgtggtggctcctccctataatcccagagacccagtaggccaaggcagaagaattgcttgaggccaagaggtcaagaccagcctctgccacacagtgagaattcatctctaaatttgttttaacaaattaactgggtgtggaatcacacacctgtagtcccagctacttgagagactgaggcagaaagattgcttgagcctagggggttgaggctacagcgagctatgatcatgctattgcactccagcctgggtgacagagtgagacaatatctcagtgaaatcaactatacaacccattattattaactatagtcaccatgctgtacatcatatctccagtgcttattcatcttatatccaaaggtttgtatcctttgacaaatatctctctttcttttccttatctccagaacctggccaccactattccacctattctgttaccaggaattcaatgtttcttttagattccacatatgagtgagatcatatagtatttgtctttgtgtgtcttgtttatttcacttagtataatgtccacattgttgcaaatgataggattcttttcttttcaaagactgaaaaaaaaatttacttttattgcttctgtaccatggctattgtgaatagtgctgcaataaacatggagtgcaggtatctttttgatataatgattttatttcatatggattttattttctttatacccagaagtggtattgctgcattgtatcttagttctatttgtaatgttttgtggaacttctaaactctttttcataatggctctaccaacttacatccctacctagtaaggaggtcgaattcccgatagctttgactgacacagctattccccctgccacttgcagttctcccaataaccgcagaatgtaccaaaaaatatgacatcttcagataaggataacaaccttatccttatccgtgcctctgttgcttagagaacaggatgttctccagtgcttacactcagtgagcccagatgagcttcatctgccatgagctgcttttctgagtcttgggggactggcttgccatggatcctaggcttctgtttattcttgctgcctgtctgtaaataatacatctgcattcactgacttgtgtgagtgtcctgtttcactggactcatgcaggtggtagagctactggggctctttccctcctttcagctgtcctcatagtgctggggctacggcggcacctgggtctacactaagtccctggcagaattaaacatcttcaaaccagcagtgaacaaggattcccttttcatccttgccaatacttaacatcttttgactttttgataatagccatactaacaggtgtgagacaatacctcatttgggttttgatgggcatttccctgatgattagtgatattgaacatattttcatgtacctgttggccttttgtatgtcttctttggaaaaatgtctgatcaggtcatttgctcattttaaaatcaggttttttttttttctattgagttgtatgatgttctgtgtatagtttgttcattattattgatgaagcgaattccatttatcaacatactgctatatacttatccattctattgctattggttatttgggatgtttctagtttgtgtctattacgaatagtacttcttagtgagtttttatatatgagttttttttcctgttgggtctgtttatatctataaagcaaattgttgagtcataagatgtatataatcagctttagaaagccttacccaaagtttttatactgattatatatacaaatacatatttccactagcaatgtaagcaggtttcatttccaccaaatcaattccaatacttttattgtctctcctttgcattttagccattctggagaatattgaatgttttaacttttatttctctgatgactaatgaagttggtgaaatttgcacatgttgattggctatgtggatagcctctgttgcgacgtgcctgatcaagttattcattcatatttctattatgggtattttgttcatatttctattactggtacagaatacaaagaccagatttggactacacgtatacgtcaactgatttaggattttgcagtgtagtgaggaggatgccctttaatagatgtgggtggtggcactatagattttgaactttttaagtgacaagaggaaggaatgtgtctactttgttcagcctgctttctacagtatttatgatactatgaataaatgaataaatgggttaataaataaataactcaaatctcctttcgtgattaacaatgtctatacttactatccataggtgttactggaatttttgtttttccacgtacaagttctcctcatttacaatggggatatgtctcaaaaaaaccgtcataagttgaaaatgtcatgtgtcaaaaatgcatttaatacgtttaacctatagaacaccatagcttaacctaggctgtcttaaatatgctcaggacacttacattagcctaccgttggacaaattcatcaatcacagagcctattttataataaagtgttgaatatctcatgtaatttattgaatactgtacagaaaatggaaaacagaatggctgtatgggtactcaaagtacagtttctgttgaatgcatatcgcttttgcaccattgtaaagttgaaaaattctaaattgaaccactgtaagttgggtaccatctgaaatgctaaattattaacctcaaaactctgttggtttaatcataaaggctaaatatgtaagtttcataattttcagggtattaatggaaatgatggttgtcttgttggaaataagttatattcttagtgagtttctgcaaatgttatactcagtaagtacaacattttaaaaagaggaaattgatttgcaatttctaaccaatgtctcatcattttcattatctttgtttgtcacactataccctattaatgatgtgattttttgccttatttgaaatagaatttaaaagaattcatggtagatattctgtgaagtttaaaaacagtaaacatcaaatgttagtttcacaaaatcttaaatctctttaaaacattgttattagaggaaggacttataactttatatagactgtgatatgaatattatataactgtaaaggcaaatagttgatatgtaataggggatatattttctatgatgctcttcctaaaaccaattaaaaaaccattcagttttaaaattagaatgtgaaaggtcatggaaaaagtggttggatttatcacttatacattatctaaatggaacacatttgtaccaacctactggaacaatttcatctgatttagccactgttagcatagcttaaaatataattcactaggaatatgtctgcaaacccattgattgtagacattgtactatgcacaatataaaggtaacagtaagtaaagctctttagaagtaaggtagcctttacaaaggggtaggagaccatctcatcaggatagcttaaaactcacacatttgtatgagtcaggagaagcactgtccttcaaaaatgattgtattctttccaattgcctgagctttgttcctcctgatgtaatctggagatctggcaaagtataaacatatttagaatcttattcattagaatactgaactcatccatcagcaggattgacaaggtctgagacaaagaattttgcctggcacacaacctgtactgagattttcctgtggctataatgtagcacacctgacagatgtgtaagtcatttaacccagcagggtactcataaataccacagaccggcactcaacatgatagggattatttttcttttgtctgcctgaagttatatggcccataatcaatacaggattgaggcataactagctaaaacatagggtgtgatatcatttatatgcaacatttctcttgcttataaagctttcaaaatgtcacagaagctgagatactttttgacacaggtgaaacatgcaaaccatgcttccttttttatgatccaaactggtttagaaaagaaaagcatcaaagatgttatttgcttatggagtaaagataatatgttacctgtttatattcttgatagctcattaaagacataatgggctttattaaaaccatgttaatttttaaatagaacttggtgaagatgaaaaggaactgcaaggacagtattttaaattctcaataacaatgtgtctgaaccagaaaaagaaaggaagaaatgaatatacatatgtagtttttcaaattatactatatgtcctaagggaaggagatagatgctattaatttaaatgtcatgtttgcatgagaatgaaacacagcgattttaaatttggctttattaaagtttcttttttaggtcaagtttatcatttggtaaatagcaattggagcaacagctcattgataaaatttatttaggtcatttgagaagaggtaacaattggggggcggggggcacacagtgctttcaaaatagcattttattacatttacaaattattacataatcaaaatcttcttgcagtctgcaactatgtagggagtttagaaatagaaaaattaacaataccttaaaggaacatataaataccacagttgcaccatggtgctcccctggcataaataacacttattttagaagctgtttttgtaagcatggatttctgagaaaaagattccagttttgttttacataggtcatggcttttaaaagtttgctttaggtttcagtgatttgctgggtgcacctgtatatgcagatgcagaaattgtttcatcttggaaaataactatagtttagcacttttgtgtcaaaataagtctgtggaagttaatgaaaacattatttcaggctatgcctaaacacaaagaatagttaggaattctgaaaaacaaacacatatcagaaaggttgaaatactcaaacaatttccttttccaatgttttgtttatgtctgctgctagttatagtatgctaactgctttcctttcactgacattctaactcctatatttccaggctaacgacctttgatttttggtcaattgatgatggtatttttttgcaagatttttcttagctaatttcggaattagacattttgccatgttagctactttggaaaggaacttcttaagtccattgtgatctctatgtgtatatctgtggctttgttttcattttaaacaaaattatatagaaagggagtggtcatagccaagaaatgatttaaataggacttacaacgtagatgctgagtgtatactagtcccctcaagtgggaagatttttccttcaagtttaaactcaatttccatttctttgggaaagccttacctggccttgctgagtaggtcaagttctcctgtgatgtgctttcaaagtaccatgtaacactgctttttagtgactgttgccattggcagtttcacatttatttttggctctttgattaatattaatatctgtctatcctactacacaccaagccccagaattataagaattgtatgttttctcattcttatatccttggagtccagcacgtgatggtgatccaataaatgcttgaagaatgaatgcacattatataacactactctacaatattgatacaatttcataatgtttaagtataattttgaaacattcttaaaacagacactactgttctggctttttgctttgtattatgtgattttggcagatcaatcaataaatgcctactctggaatcatttgagagatatatccagaagttggatataggttggaggacttggcttagatgtgtggccatcgcagggttactgatttctcaccctcacacagttaacctcacccctcagtcacagtcaggctcctgctttggaccaaagaggagtaaaaattatttcccatcaatggatacctgagaaatagcaaacacctcaaaggggaaaatgctgagaaaagatttagagatgagtcaaagtatcttgaagacaggtgaaacaaatggaatgagaacattaagccttagtaggcatttattgtcttttaacctagagaataaaaaacaaggaaagaagagaaactctcaattcctgacctatctctttgtgttcagccatgaaataagaaaattaaactatttgtgaattaaaaaaatacatctagaaaaataaaacaaacgtttctgaactttgatatctgagtcttaaaagtttctgacacagtctttactcttttggtattacagcagataaccagtatgttccccattttcaaccatcttcttccatgatattaatgtgaaaatcataagcaagcaccatatacatataaatactttaaatctgttttgtcattttatctgggaggcagtagagtgtagatattaagaacagtgtagtgtagagattaagaactgggttaaaagatgcaatgtatatgacgtgtttaatagtacactgcctgataaaatggtagatgttctataaaatgctggtcacttttctcattatgattgttgccatagtagaatggaatgtcccattgtccagtttactcaagcactgctctcaatgctggggttttccttctatgacacttctacccttctgtatgttaaagacctccagattaattttgggaaacttagaatattccgggccttcaaaaaagagtgcacatgaatacccaggaagtctgcactgagctcagaaaattctcatgaagggacctgatgaccagaggcccacacccctctgtgaggagaggtacagccagcatgtcttctctgtctgagtaaatgttactctgagtaatgtttcttgctgttggcttagcttccatgcggctcccagagtgtttgtgcatctgcgcatgctgacctcacttctctccacctactcatctcagattcagctcccttttctcccacctttgatgtccaataaggccataccttattcaccaactctccatccctcccacatcaatacaggtgactcaccttgatttctcaagggggtgtgggtggaatgatctaattcttcttccagtctctttccatatttattactttggctgtgaaaaccttcttctttttttaaaaataatactctaaaacgtctgttctacaagtaaaaaataaaagaaaccaaacagtgattatattttgatcttttttgttttgtttttgcactataaaattctatttctctctaacacaatagtgaaactctttacctacgggggtgggaggggattcacatataaggaattcagaaaaagaaaataacatggattaatattccaatttactagtttgctacattattattattaaatgccaccttaacactatcaaataaacactatcactctcatttattgacacaaaactaacacagtgacaatgcaaatatcttgttcacagcaacagcccaaacaaagaccaggagctctgacgccaaagctcacagtgtagtgcttcttcaaaaagaccatgttccctcttgcctcaggaagtttgcatgccctgctttctttgtccaatgcctggctaaattgtaccataatggtttcatgctgtgtatcacagggtttgcacagggtgatccatcaaaaagtgggaagaaaatatgcagttcttatttatacatttctatctatgaagtaagaatgagtaaaacgttataaatgtttactctgactaagtactgatgcccttgagggattttgaaaaagaaaggaagttccacaatggggaaagggcatggcagaagcctctttcttgttagcactgtgcagagcaatgtttgtagcttatgcatgccaagttaagtgggtttatgggttatactcttattctaaataaattgatccttacaaaatggggaaaggtcataaagggttttctaaatagaaactgtaaactgaagacaatttaatactattattgcaagaacaagcaagtgacaaaaaagaacgaaactgacatatcaactattgtatgagctttgttttctagtcacacaaaacacagacaattagacaatatattggccaggaaactagaagttctcaaaaagattagaataagttgttacatataatatttatttaagttacaatttgtcttttcacattctgtgttttaagatatgggaaaatggtgtcatttagtatggaaaaataaggcaggtgtgaatatctgtattcacttccaaccaactgataatttggtttatgaatgccgttcctatattattacctgcagaatgatcacatgtgtatttgtcacttttttggtcctgattatatatatatatatatatagtattcttaacaattaacctcactatttgtgtgtaatttgtgttttattatccattaattgttgatggtaatgcatgtatataattcataaatgcatattttttatagatggggtacatgaggttcatgataaaaagttactaatccttaataatcatttaggattcagcttggacattataggcatacctctgacatactgtgtgttccattccagactaccaaatataaagcaagagaaatgggggaatagccctttggtgggacggtcagaacacacacaacatttatcaattaattcacgatcttttatgggtgtggtttatggcaccccaatacaattaaaatgttaatatcaaagatcctcagattacagattaccaaaatggatataatgacaataaatttttttgaaatattgcaaaaattactaaaatatgacacagacaggaagtgagcacatgctgatggaaaaatggtgtcaatagacgtgctagaagcagggttgccacaaacctttaatttgtaaaccgtgtgaaaggcagtaaagtgaagtgcagtaaaacaaagcatggctgtatttttttttctattgtaatatttttgcagaatctacaagaattgactcttttgcagcttcctctccaccaagtctgtgatggcagggacagtgtcttactcatatttgaattctcacgatagagcaatgtgtctgacaaacagaagtcatgtgaggagactaataaagacgtattcaccacaaactaccaaagacttagctgatatcataaaattgaactcgggcacatctaggcatagctctctgctttcaagttgtcctttaaagcccgggcaggcactttcctctgctccccatggtgtccctgcatgcgtctttttggttgggcttcccagtcgactcaatattcagcatattgagtaatttctccagtcacttctgcctgtggcttctgtaaaatagcaaaaattagcaagaaatttttgtgactcatactcagcaatgggtctagctccaactctcattgccttattctactttagtccttcctcttcttaagcaggtcacgacatggataactgattgatgagagataagtgagtaatagtaagtgttagagggagaaagtggactctcaaactttctctaaggagcacttattacctcctttaactgtaatgatcccatgtggaatgacagtaatagtcgcaagcagccacgtgtgctggaggtaaagggttaccttataacactagagagaataaggctaatggcaaactctaggatgaaactgttataagaatccaggttgtgctaaaggtgtcccataacaaagtagagtcagtagaattgcagggatgtagatgaatttgaggaatatgaaggaggtagaaagtaaggatttgagtcctggatgatctcatgtttctggcttggacagttgcatgcttggtgatgccattcattaagaaagttatcatttaatagtattcattgtgtatacgtagcacattttctttatccatatacaaagtagacaaaatacagtcatccctcggtatccatgggggattgattccaggaacccctgtggacaccagaatccacagacgctcaagtttcttatataaattggcttagtatttgcatataacctatgcaaagcctcccatatattttaaatcatcattagattatttataatgccaaacaccatctaaaagctatgtaaattgttatcctgtattgtttagggaatgatgacaaggaaagaagattgtacatgttcagtacagatgtaacaatatgtatatacacatatatattttttccaaatattttggtctgtggattactaattgcatgaatggggaactcacagatatggaaggctgactgtactgcatgatcgcatgtgtatgcagaatctgaaatagggaaattcatagaaacacagagtagaatggtgcttactagggtctagaggcaagagaagggttgaggggatgggattgaggtgatgttggtcaaaggatacaaaattccagtagacaggaggaataagttctagagatctattgtacaacatggtgactatagctaatagcaaatgtcttatatatttgaaaaatgataatggtagattttaagcattctcactacaaaaaataagcatgtgaagtaattatagtttgatttagccattccacaaagtatacatatataacaccatgttgtacattataattttatggaattttctttattaatgtaaaaaatagaaaaagaatcactgacgaaagaggaacatgttttcagggtaaagaggataaatgcgtggtaaaacaaacaaacagacagacagacaaaaccccccaaaaaacacagtccctttattggttccattctgaatctggtctccacattcaatcgggcaatgaaatttgaccaatagcctttttatattttcgtggggaggcctagatcacattcttcatgatgacactctaaaacattcactgcactcctcaagcctgtgttggaaaactcgccatcctgctctccctacttgtaggatcatcccagagacaagctgctcctctactgctcaaagaaattagaggtaatcggccacacgcagtggctcacgcctataatcccagcactttgggaggccgaggcaggtggatcacgaagtcagaagatcaagaccaccctggctaacccggtgaaaccccgtctctactaaaaataaaaacaattagccgggcatggtggcgggcgcctgtagtcccagctactcgggaggccgaggcaggagaatggcgtgaacccgggaggaggagcttgcagtgagccgagatggcgccactgcactccagcctgggctacagagcgagactccacctcaaaaaaaaaaaaaaaaaaaaaaaaaaaaaaaaaaaaagtaatcaggcagagtccgccaccccctcttccctttctgtcatccccactgccaatcattccccattctgtctgtttctcgattatctttggagtctctccactttccttttatttccccactgtcgctaccgagtccagattgttagaggcttttaccttgatttttgcagcagcctggtatggttctctagtttcctctcattgctctctccattctatcctccactttgaaaccaaagtgatatttcaaaattgcaaatctaattatatcacccctttgcttcaaactttgcaattgtatctcagcctgacttcacaacatggctcacttagacttctccagcattgtctcttgccacatcttcctgttctctccacactgattcaattcgtaaaatgtaccacattttttattatggccagatatttgcacatactgtcccatttgaaatgaaatatgatttattttatatttgtattactgatatttctaatgttgaatcttaaagttttcattcaaaagtcacttcctcctggaagtttttctgattctcactccttccctgaattagggaaatatgaattaggttcccctcttatgagcccacactacatcttatatttttcctatcatagctcatcatggagcttaataattttttaggtttctttggtaagaatcccacagtgcactatataaaggcaggacctgtttctgtctcctgactgtctcttagtacccaataaagttcctactatataccaaatgttctataaatacttctaaagcatattaaatgttgaatgatttatatgacattattctatacatttgagccattttaaatgtgtatgataactaacctagattaaacaaagaataaatgtctatgaaaaaagactttaaaataaataaataaataataaataaataaataaatagcttgacttttatcaatgtagatattcaatcttgatgattcaacacattggaatcttgctttttcccatctggagtattttgataattacttaacacattttataatagagataccatctgcaaatttcagtcttgccatcttttcctaatctatcacacaacactgaggtcctagaaagcctgaattcctgagattttgattgatgcgaatataacttctaattctatttactcatgaacatcataatattttaaaagtaggcccttttttttaacttaactgtgaatagccattaatcatttttcttctgcagagcatggttctccgtcttatgttaactatcacttgctattatttccatataactgaatattatctccattcccctgaggtcacttcaaactgttgttacctttgaaacccttcttgttgaatccatcctgctcataaccatcaggttaattttaacaacatcactgatcattagagaaatgcaaatcaaaactacaagatactgtctaacacccatcagaatggctattattaaaaagtcaaaaaataacagatgctggcaaggttgtagagaaaaaggaatgcttttatactgttggtgggagtataaattagttcagccattgtggaagacagtgtggtgattcctcaaagacctaaagacagaaataccattcaaccctgcaatcccattactcagtatgtacccaaaaggatataaataattctattataaagacacatacatgtgtatattcattgcaggactattcacaatagcaaagacatggaaccaacctaaaagcccattaacaatagactgaagaaagaaaatgtgttacatatataccatggaatactatgcagccataagaaaaaacaagaacatgtcctctgcaaggacatggatggagctggaggccattatccttagcaaactaatcagaaacagaaaaccaaacactgcatgttctcactcataagtaggaactaaatgatgagaacacttcgacacataaaggggaacaacagacactgggagtctgtcagaaggtggagggtgggaggagagacaggatcaggaaaaataactaatgggtgctaggctgaatatctggatgatgaaataatccatacgacaaacccccatgacaaaagtttatctgtgtaacaaacctgcactagtactgctgaacttaaaagttaaaaaagaaaacacaaaatattgttattttcattgtatttcctgtgatgtaaaaaaaaaaaaaaaagtttaacaattttatttgtttcctagggatctagctttcaaaatttaatgcaggagaaatttttcttttcaaagaaatacctgtagattctccattatatgtgttacatgtgtgtgtatgtgaatgaatgcttggcaaggagacatctctggaagaaacagggagatactagttgtaaggacaggagagtctagacgagagccagtgaactgtagtgtttgtaaaggaaaacaggaaagatgtgagaaagaaccatgagctgtgaaactctggggaaggacaggggtaaagataatttttagaataatttgctgtatgtaggcaatctagtactctcatgcttcaccatttcttcaggtaaagtaaatcaatacattgaaccaacagatttcatggagtgtgaattgctcctctcactaccaaaaatacacattgaagctccacttgcaagatcaataacatcaataacaatagaaatcacccagaaaatatcattactttggtctttcatcttccctttaatatttacttacagaggcaattatttcctctcaggtagctctgcatatttacagatctctggaaaaaaaatatggtcattttaaatacagctataattttgccattaaaagtagttcgcaccatatgataatcaaactttgaacctgacttaaagttaaatttaccctccttctcctcctcctccttctcctttcttcttcttcttcttctttgcttgtggcttcttagtgtacctgtggcacactaaagatgatctcaagttctttatagctcccctcatcaaaaggtagaatccacttcattaagctatgcatctggattggctttgtggcttgcttaaatatgatagaatgtgttggaaacgacattatgtgaatacttctgtcattatgcaaggaagcctgagatgaaaaacaacttagatagacagcgggactggctcagccatcccagttcttctagtctctccaattaatgctcctgaaatgtcggtgaggatgttttacaccaacctctctcccccatccaagctgccaactgactgacggagccctcctgtgctggctcaggtgatattggcaggtgagctgcctagttaattcacaactgggagaaaataagaaattgctgttttaagctacagttttgggtgatttcaagagagatcacgaatacactccaccaggtgattttactggttaaaagctagaagaacctcatggccacttgtggcccatgagaactaatcaggcatcctttgtcccaacacactttaggaatgttggtgactctccatgcagctacttctcctagacagcccctactttttcttttgaattttccaggcaagagcaaggcaccagttcaccatatctgtctgaggaaaagaacatctatcaatctcctgagagtgcccatggaaacttatctcattagactttaggagatacttcccccatgtcttgatcttctcttttataagaaatcctttcaattttatttttctttcccacctagatagacagtattgtgtatgtggcttttagccactggtctacaatcctttctctacaattctgagatctaaatagctcttagaaaatagaacagaatgtatgcatgtatacatgtgtatatctataatacaatataaaattatatgtatacacatatatgattatttgacagcaatacctaacatcaggctatttataatctttataaaccttatttaacccacttgttgggaatatacatacattttgttgcagaaatcttcatatatgatattcattgagggtgtgatataacatatggtatactatcttttcttttttattttttttagatggagtatcactctgttgctcagggtggagtgcagtggcatgatcgcaactcacttcaacctctgcctccccttcaagcggttctcctgcctcagcctcctgtactatctttctaaaattataaaaattgaattattaaatagatctttccccaaggatttcagaagaagagactccacagctccacaggagctcttttcttttctttgaataattgtatcctgattgagtacctgattttggtatcttatatctattatccatttttttattgaaccaaaatacacatttcaacaactgttaaactaggttaaaattcaccaagtcattagacttggatttatgtttcttttagaagagctaccatccatatggcaggctgcaaaaggccagtcttagcagacattgtgaagatgtgacttacgttctcaaataaactatcttctcaatggatcaataaagttatttgtacttcccttaaattatagcctaattttttttctcttagatattaaaaatagtcgatgagattaaccagttctatttcagaatgggtctaagtcagtgggcttaaactatactcagcaggcctgcttcagggactcagcaaggagaggcagttgaaaaatgaggtggcacatgcaagtctcagagttctcaaatgcacttagtctagtggatttccccttttaatgtgctgtaaataataaaattcatgattttccttgaagacagtattgacattgctaatatgaaatacacagatgttttggaatttttgtataataaattgagtgttcttttattccaacttttagcatcaggttaatacagccaatatttatttcataaacttaatttctatgctttattccatcatctaaagctattatcataattttatttttatgtattttttaattttaatttttaatttttgtgggtacagagtaggtgtataatatttattggttacatgagatgttttgacacaggtatgcaatgcgtaataatcatatcagggtaaatggggtatctattgcctcaagcatttattctttgttacaaacaatctattttaaacaaaaataataccggatccatgctttactactgttgaaacctcttgctgcactttgtaaatattttactttagcattttcactttttttttttttttttacaatttttatattctagggtttttacaggtttaggtctaacatttaagtatttaatccatcttgaattaatttttgtataaggtgtaaggaagggatccagtttcagctttctgcatatggctagccagttttcccaacaccatttattaaataaggaatcctttccccattgcttgtttctgccaggtttgtcaaagatcagatggttgtagatgtgtggtgttatttctgaggcctgggtttggctgatgcttctgtgggtgattgcattggttcttggaagactgtgtcatggctgggggcccacgatacctattttcctgatcagatggatgaactgtcctctggcttatagtttatgatttccctgtccatatactaatgttttatcttttatttttaaaatagagctttacagttttcaaagtgctgccacatatgtcacctcatttgacctctcctttatgagacatacagattagcatagaaaaaaggtgaaatatgctaaataatttctattggtcatagaactatcaaatataaggaaaaactagaaatcagttcttttattaccattatgtaatttctaaaagcataaactctcatctcataaatgaaagattcctgtaccttttactttttctgccacagattttgaagttgttgacaagtgtgtcattgaaacactttttttgtttattaatttttgtgtaaccattaaaagaagggaatacactgaaatatgtatccctaaacattttccatacttgactataagttgagctgaaatctcgatttaatacatatatatatatcatgtagtttatatgatttaattcaatttaatacatatatacaaatcatgtagtttctttggaaaacaagtataatggtcttgtgagaatcctttataacaattgttcagagaaatatatttacaaatcttttggaaacgttctctaaaaatactaaaacagggtggctggcaagatggcagagtaggaacagctctggtctgcagctcccagcgagatcaatgcagaaggcaggtgatttcttcatttccaactgaggtacctggctcttctcattgggagtggttagacagtgggataaatgccccaattaaaagacacatattggcaaattggataaacagtcaagacccattggtgtgctgtattcaggagacccatctcatgtgcaaagacacacataggctcaaaataaagggatggaggaatatttaccaagcaaatggaaagcaaaagaaccaggggttgcaatcctagtctctgataaaacagacttcaaaccaataaagataaaaaaagacaaagaacggcattatataatggtaaaggaatcaatgcaataagaagagctaactatcctaaatatatatgcacccaatacaggagcacccagattcataaagcaagttcttagagacctacaaagagacttagacttccgcacaataataatgggagactttaacatctcactgtcaatattagacagatcaatgagacagaaggtcaataaggatattcaggacttaaactccactctggatcaagtaaacctaacagacatctacagaactctccaccccaaatcaacagaatatatattcttctcagcaccacatcacacttattctaaaattgaccacataattagaagtaaaacactcctcagcaaatgcaaaagaatggcaattgtaacagtctctcagaccacagtgcaatcaaattagaactcaggattaagaaactcactcaaaaccgcacaactacatggaaactgaacaatctgtgcctgaatgactactgggtaaataatgaaattaaggcagaaataaataagttctttgaaaccaatgagaacaaagacacaacgtaccagaatgtctgagacacagctaaagcagtgtttagaaggaaatttatagcactaaatgcccacaggagaaagtgggaaagatctaaaatagacaccctaacatcacaattgaaagaactagagaagttagagcaaacaaattcaaaagctagcagaagacaagaaagaactaagatcagagcagaactgaaggagatagagacacaaaaacccttcaaaaaaatcaatgaatcccagagctgttttttgaaaagattaacaaaatagataggctgcaagccagattaataaagaagaaaagagagaagaatcaaatagacacaattaaaaatgataaagtggtggttccaagatggccgaataggaacagctccagtctacagctcccagcatgagcgacgcagaagacaggtgatttctgcatttccaactgaggtaatgggttcatctcactggggcttgtcggacagtgggtgcaggacagtgagtgcagtgcactgagtgtgagccaaagcagggagaggcatcgcctcacccgggaattgcaaggggtcagggaattccctttcatagccaagcaaagctgtgacagatggcacctggaaaatcaggtcactcccaccctaatactgcacttttccagtggtcttagcaaacagcgcaccaggagactatatcccgtgcatggcttgagggtcccacacccacggagcctcactcattgctagcacagcagtctgagatggaactgcaaggtggcagcgaggcagggggaggggcacccgccattgctgaggcttgagtaggtaaacaaagcagccaggaagctcgaacagggtggagcccaccacagctcaaggaggcctgcctgcctctgtagactccacctctgggtgcagggcatagctgaacaaaaggcagcagaaatctctgcagactttaatgtccctgtctgacagctttgaagagagtagtggttctcccagcatggagtttgagacctgagaacggacagactgcctcctcaagtgggttcctgaccccagagtagcctatctgggaggtaccccccagtaggggcagactgacacctcacacggccgggtacccctctgagatgaaacctccagaggaaggatcagacagcaacatttgctgttcagcaatattcgctgttctgcaacctccactgttgatacccaggcaaacagggtctggagtggacctctagtaaactccaacagacctgcagctgagggtcctgactgttagaaggaaaactaacaaacagaaaggacatccacaccaaaacctcatctgtacatcaccatcatcaaagaccaaaagtagataaaaccacaaagatggagaaaaaacagaacataaaaactgaaaattctaaaaatcagagtgcctctcctcttccaaaggaatgcagctcctcaccagcaatggagcaaagctggatggagaatgatgagttgagggaagaaggcttcagacgatcaaacttctctgagctaaaggaggaagttggaacccattgcaaagaagttaaaaacctggaaaaaagattagatgaatggctaactagaataaccaatgcagagaagtccttaaaggacctgatggagctgaaaaccatggcacgagaactacgtgacgaatgcacaagcttcagtagccgattcgatcaactggaagaaagggtatcagtgattgaagatcaaattaatgaaatgaagtgagaagagaagtttagagaaaaaagaataaaaagaaacaaacaaagcctccaagaaatatgggactatgtgaaaagaccaaatctatgtctgattggtgtacctgaaagtgacggggagaatggaaccaagttggaaaacactctgcaggatattatccaggagaacttccccaacctagcaaggcaagccaacattcaaattcaggaaatacagagaatgccacaaagatattcttcaagaagagcaactccaagacacataattgtcagattcaccaaagttgaaatgaaggaaaaaatgttaagggcagccagagataaaagtcaggttacccacaaagggaagcccatcagactaacagctgatctttcggcagaaactctacaagccagaagagagtgggggccaatatttaacattcttaaagaaaataattttcaacctagaatttcatatccagccaaactaagcttcataagtgaaggagaaataaaaccctttacagagaggcaagtgctgagagattttgtcaccaccaggcctgccctagtgctcctgaaggaagcactaaacatggaaaggaacaactggtaccagccactgcaacaacatgccaaattgtaagaccatgaatgctaggaagaaactgcatcaactaacgagcaaaataaccagctaacatcataatgacaagatcaaattcacccataacaatattaactttaaatgtaaatgggctaaatgctccaattaaaagacacagactggcaaattggataaagagtcaagacctatcagtgtgctgtattcaggagacccatctcacgtgcagagacatacataggctcaaaataaagggatggaagaagatctaccaagcaaatggaagacaaaaaaaggcaggggttgcaatcctagtctctgataaaacagactttataccaacaaagatcaaaagagacaaagaaggccattacataatagtaaagggatcaattcagcaagaagagctaactatcctaaatatatatgcacccaatacaggagcacccagattcataaagcaagtcctgagtgacctacaaaaagacttagattcccacacaataataatgggagactttaacaccacactgtcaacattagacagatcaatgagacagaaagtcaacaaggatacccaggaattgaactcagctctgcaccaagcagacctaatacacacctacagaactctccaccccaaatcaacagaatatacattcttctcagcaccacactgcacctattccaaaattgaccacatagttggaagtaaagcactcctcagcaaatgtaaaataatagaaattataacaaactgtctctcagaccacagtgcaatcaaactagaactcaggattaagaaactcactcaaaaccgctcaactacatggaaactgaacaacctgctcctgaatgactactgggtacataatgaaatgaaagcagaaataaagatgttctttgaaaccaacgagaacaaagacacaacataccagaatctctgggacacatttaaagcagtgtgtagagggaaatttatagcactaaatgcccacaagagaaagcagaaaagatctaaaattgacaccctaatgtcacaattaaaagaactagagaagcaagagcaaacacattcaaaagctagcagaaggcaagaaataactaagatcagagcagaactgaaggagagagagacacaaaaaccccttcaaaaaatcaatgaatccaggagctggttttttgaaaagatcaacaaaattgatagactgctagcaagattaataaagaagaaaagagagaagaatcaaatagacgcaataaaaaatgataaaggggacagcaccaccaatcccacagaaatacaaactaccatcagagaatactataaacacctctacgcaaataaactagaaaatgtagaagaaatggataaattcctcaacacatacaccctcccaagactaaaacaggaagaagttgaatctctgaatagaccaataacaggctctgaaattgaggcaataattaatagcttaccaaccaaaaagagtccaggaccagatggattcacagccaaattctaccagaggtacaaggaggagctggtaccattccttctgaaactattccaatcaatagaaaaagagggaattctccctaactcattttatgaggccagcatcatcctgataccaaagcctggcagagacacaacaaaaaaagataattttagaccaatatccgtgatgaacatcgatgcaacaatcctcaataaaatactagcgaaccgaatccagcagcacatcaaaaagcttctccaccatgatcaagtcagcttcatccttgggatgcaaggctcgttcaacatacacagatcaataaacaaaatccatcacataaacagaaccaatgacaaaaaccacatgattaactcaatagatgcagaaaaggccttcggtaaaattcaacacccctttatgctaaaaactctcaataaactagggattgatggaaggtatctcaaaataataagagctatttatgacaaacccacagccaatatcacattgaataggcaaaactgaaatcattccctttgaaaatcggcacaagacaaggatgccctctctcactactcctattcaacatagtattggaagttctggccagggcaataaggcaagaaaaacatataaaattgtattcaaataggaagatacaaagtcaaattgcccctgtttgcagatgacatgattgtgtatttagaaaaccccactgtctcagcccaaaatctccttaagctgataagcaacttcagcaaagtctcaggatacaaaatcaatgtgcaaaaaacactagcattcgtatacaccaataatagacaaacagagagctaaatcatgagtgaactcccattcacaattgctacaaagagaataaaatacctaggaacacaacttacaagggatgtgaaggacctcttcaaggagaactacaaaccactgctcaaggaaataagagagatcacaaacaaatggacaaacattccatgctcataggaagaatcaatatcatgaaaatggccatactgcccaaagtagtttacagattcaatactatccccatcaagctaccattgcctttcttcacagaattagaaaaaactactttaaagttcatatggaaccaaaaaagagcccatatagccagacaatcctaaacaaaaagaacaaagctggaggcatcatgctacctgacttcaaactacactacatggctacagtaaccaaaacagcatgctactggtaccaaaacagacatatagaccaatggaacagaacagaggcctcagaaataacgccacacatctacaaccatatgatcttcgacaaacctgccaaaaactagcaatgggtaaaggattccccatttaatagatggtgttgggaaaactggctagccatatgtggaaaactgaaactggactccttccttacaccttatacaaaaattaactgaagatggagtgaagacttaaaagtaagacctaaaaccatcaaaactctagaagaaaacctaggcaataccattcaggacataggcatgggcaaagacttcacgactaaaacatcaaaagcaatggcaacaaaagccaaaattgacaaacgggatctaattaaatgaaagagcttcttcacagcaaaagaaaccatcatcagagtgaacaggcaacctacagaatgggagaaaatttttgcaatctagtcatctgacaaagggctaatatccagaatctacgaagaactcaaacaaatttacaagaaaaaaacaaaaaaccccatgaaaaagtgggcgaagtataagaacagacacttctcaaaagaagacatttatgtagtcaaaaaacacttggaaaaaaatcttatcatcactggccatgagggaaatacaaatcaaaaccacaatgagataccatctcacaccagttagaagggcagccattaaaaagtcaggaaacaacagatattggagaggatgtggaggaatagaaatgcttttacactgttggtgggagtgtaaattagttcaaccattgtggaagacagtgtggcaattcctcaagaatctagaaccagaaataccatttgacccagcaatcccattactggatgtatacacaaaggattatatatcattttaccataaagacacatgcacatgtatgtttatttcagcactattcacaatagcaaagagttggaaccaacctaaatgcccatctatgatagactggataaagaaaatatttcacatatacaccgtggaatactatgcagccattaaaaaggatgagttcatgtcctttgtagggacatggatgaagctggaaaccatcattctcagcaaactaacacaagaacagaaaaccaaataccgcatgctctcacttatcagtgggagttgaatagtgaggacacatggacacagggagggaaacatcacacactggggcctgttgagggggtggggggtcaggggagggatagcattaggagaaatacctaatgtaaatgacgggttaattggtgcagtgaaccaccatggcacgtgaatatatatgtaacaaacctgcacgttctgcacatgtatcccagaacttaaactatattttaaaaaaagacaaaaaaaaaaacccaaaaaacaaaaaaactaaaacatattgtaattttcagactcgccacaagatggcggcaaattactttgtttagtttaaaaatggctagtcttttcctaggttgaaagattaaactctttctgtttcctgcaagttgctgcaatagatgtgagctaattggagattgcacatacagttttagcttcttttccttcaacgagagttcccaacttcattgacatttgtatcaacaaactcgcagttctctgtggttgaaatattggcaacattatttatttttcttcttccttttagaatgtatctccaatccttaccataaaacaaattctttgtttttcttttgtttgtttttaatgtcaaatagattagccttcttctttcctctgcccctttcataaaagttgcttttatttgagttttgatgattacttagttattacaataatttcctacttggcttctggaatccaaaatactcaaaatgcaactaaagaaaccactattacttaacagttaagaacaaaggactactgtaattgtatcactgccttgattcaacccctcattatctctaaaaccaaggcactttccctttttgtttttctccaagcattattctcaactcattctctctctgttaaggtgagtcttattgctgttaccagcatgcagatcatttattctcatgactttcttcacaaatataatttttagtattccctgtatttcctccacctgttttatctacttcatctcttttttacaaggttatggaaaacttgcttcctttagaaaggatgccttacctcagagtacaacaatgtcaccttgttttcttattccaaacttccctagggctagtctatttgctaatatgtctctgtctctctatatagatttacttaatatttgtatgctcttttgaaaatattctttaatttttttgcatacctcttatttcattagtattgcatatctcttgcttccattccaagaaggtatcaatcaattacagcacaaatgtaaggctcctattgacttgcacttaatttattctccaaattatatcactagtatacaacgtaagttactcaatacttattcttgatctatttatatgcaccaaaatataatacaatcagtttttaataacaccctatctcaatgatttaagatttggcagattttatttattaaatggattttactttccatgtatgaagccctgaatataatcttggtgtatcaactgttgccataaaaccaagccatttatagttttataatgtgacttatagatatttgataaaaattagtacattgaagatggctgactagacatagccaggaagagccattcccaccaagagagagataaggtttttagtgaacgaagataatttgtacagatcttcagagcgagaacaccaagagtggatggagatgtgaggtatgctctgaggctgaggagggatggggctgggaaccatgcacagggtactcaaatgctggggctagttccggccttgaatggcttctggggaacaaatgagtgaaagccctgtgggactacccatgctctctgcggacctctggaatcttggctacaggagacctcatgtcctccatggattcttgagttggtgggggatctgccttgagaatagacagagatggggcttcagccagcacagaactaggggcctttgtgcatggcgtagctctggcagagtgtggccataggcttccgtcacccagggatacccctttcattccccaggcaggttgagtccctgctgacagctggaccaggggaaagtggggctgacttctacacaggactggggcatgtctgttctacagcctttgttgcctgccatcccctcccaggacccctgcctagccactctgcaaggcgcatgtgaacagtgcagccaccactgcctagcatgggtgctttgcttcacctgattacattcctggttgcttgggagtactttgggtcacccagcacacctggaacctgactctgagggtcaggagggtggagccacaagccattcccaggactccaagtctatagtgtgcagcttgggagtgctgagtcaaaatctatggctggcccttgagcagaagagaagcccacactctcagagcactaagaggcgtgaaatacataggtcatgggttggagtgggagcagggcatgcctccctttagagggctggcctggaaagggtgtggcctatctccttgtcaagacctccacccagggagtcctgtggctgataatgcctaataaaagaaatgctggcacagtgtcagtgatgagggggtgtcccccaagggccaggagtaaacttggtgaaggggttacctctcttcccatcacatcacagagcatggctgcaaatgtgaggaaatatagaggagctccttggctaagagcctgtctaccacccattaatctaagtgtcgtctactggattacagcccaaactataccaccaaaaatattttaacaatatatccccctatgaaacaaaagggaagaattcagccacaaataaagactctgtacagaggtttggacctctgaaaatgtccagaaatgaagccaattgattacacccaaattacaccacaggtaaaaaaaccagcaaatccactttgggaggctgaggcgggcggatcacaaggtcaggagattgagaccatcctggctaacatggtgaaaacccatctctactaaaaatacaaaaaattagccgggtgtgggggcaggtgcctatagtcccaactactttggaggctgaggcaggagaatggcgtgaacctgggaggcaaagcttgcagtgagccgagatcacgccactgcactccagcctgggtgacagagggagactctgtctcaaaaaaaataaataaataaataaaaaagaaagaaagaaacaccaaaccttccagttgagaaagaatcagtgcaataactttggcaatataaaaaagccagagtgcacccttacctccaaacaagtctattaatactagctgtccagcaatggttcttaaccagtctgaaatgactaaaatgatagacatagaattcagattctaggtggcagggcaactcattgagattcaggagaaagttagaacccaatccaaggaatccaaggaatccgagaactaaaagagaaaacagccactttaagaaagaaccaaacgaacttttagagctgaaaaattcagtacaagaatttcataatacaactggaatagaacaaactgaggaaaggctctcagagctcaaagaccaatccttcaaatcaagtcagtcagacaaacaaaaataaagaaaaatgggaatattggattatgtaaagagactaaatctatgactcattggcattcctgagagagaaggagagagtatgagcaacttgaaaaatatatttgagcatacagtccttgaaagttttcttaatctcactagagtggatgatattcaaattcaagaaatacagagatccctggctaaatactatagaagacagccatcctatggtgcacaatcatcagattcaccaaagtcaacccagaagaaataatctttaatgcagctacagagaagagtaaagtaatgcacacagggaaagcatcaggctagcagcagaccttttagcagaaattttacaacccagaagtgattgggggccaattttcagcatccttaaaaaaaaaaaaagaaagaaagaaattccagccaagaatttcacatcccaccaaactaaacttcctaagtggaggagaaataaaattcttctcagacatgcaaatgctgagagaattcgtttcaactagaccagccttaaaaaaggtccctaaaacagtgctaagcatggagtcaaaagaatgacatctactatcacaaaaacacaattaagcacatagcccacaggcactatgaatcaactacacaatcaaggctacaaaacaaccagcatgacaggattaacatctcacatatcaatactaaccctgaatgtaaatgggaaaaacaccctattaaaagacatagagtggcaaggtggataaagagaaaagacacagacatcttttgttttcaagagacccatatcacatgtaatgacatccacaggctcaaagtcaaggaatggagaaagatctaccatgcaaacagaaaacaataaaagataagagtcgctatttttctatgagataaaacagatgttaacccaataaaattaggaaggatgaaggatattacatagtgattaagggtataatccaacaagaaggcttaggcactcaacattggaacacctaaattcataaaacaacttcttggcctatgaaaggatttagacaaccacataataatagtgggagacttcaacgctccactggcaacatcagacagatcatcaaggaagaaaactcacaaagaaactctgaacttaaacttgacactcacttgaccaattggacctaatagatatccacagaatgtgcccctcgatatccacaaactacattcttctcacctgaccacagaacatattctaagattgatcacatgcttagacatacatcaagtctcaatacatttaaaaaaaattgaaattataccaggcacactcttagaacctagtacaatacaactagaaataaatatcaggaagatctctgaaaactacacaaatatgtggaaataaagtaacttgctcatgaatagctcctgggcaaagacagaaattaaggcagaaatttaaaaatgctttcaaattaatgaaaataaggatacaacttatcaaaatctctgggatgcagtcaaagcagtgttaagcggaaagcttgtagcactaaatgccttcatcaagaagttagaaagatctcaaattagcaatctaatttagcacataaaggaacttgaaaaaaaaaaaaaaacaaagctagcctaagaaaagaaataactaaaagcagagcagaacttagtgaaattgagaccaaaatatccatacaaaacatcaacaaaaccatgacttggttattcaaaaaaaaaacaaaaccacattgaccattagctagattaacaaagaaaaagagaatccaaataggtacaacaaaacatgacaaagatgacattatatcagatcccgcagaaatacataagattctcggagaatacaatgaacaactctatgcgtgcaaattgaaccagcaagagattgaaatcctgaatagacaaatgttgtgctctgaaattgaatcagtaataatgttaaaaagcccactaaccaagaaaagcactggatcagatggattcacagccaaattctaccacaagaacaaagaagaactggtaccaattctactgaaactattccagaaaattgagaagaatgagctccttcttaactcagtctataaagccagcatcagcctgataccaaaatctggcaggaacacaacaaaaaaagaaaacatctggccaatatcccttatgaaaatacatgcaaaaatcctcaacaaaatactagcaagccaaatccagcagcacatcaaaaaattaatacaccatgatcaagtaggttttattcctgggattcaagggtggttcaatttatgcatatcaataagtgtgttttaccacataaacagaattaaaagcaaaaagcatatgatcatctcactagatgcagtaaaaaattcaataatatccaacatccctttatgacaagaaccatcaacaaactaggcatgcaaggaacgtacctcaaaataatgagtcatctttgataaaccaacagccaacattatattgaatgggtaaaagctggaaacattcctcttgagtactcacctcaactgagcgaagactgtgccattgcaattgagcctgggctacagagagactctgtctcaaaaaagaaaaaaaaaaaaaagagagaaagaaaaaaaatcactttgtctagcctgtatgcagaacatagggaaaattctatactattcctaagtttcatttcaattgcatccttcaacactttctggcgggtttgtttgcttttgcccagggcacatgttttagcttacgtaatactgtgttagagtttacacaggactaaatgtggctttaccttattataatatcatatttggtcacataccttgacaactggtctgttttaatcctggggacattttgatccttgtaatggataatggttctctcttgctttttgttcttttgaaattgcaaatttggttcacctccagtaattgcacaatgctgtatgatactaatttggcatggtaaattttttgcttggatttattatttttctacccaattcttcctcacctctttcctaattgttctcaattacttatttttactgttcccttatatgaatattttctaagtaattttactcttttgtgtaatgatataggtcctgaataaataccattttgacgtctaaacatgacatactatggcactggggagagatgtccaagtcccagagtctaaaggcattatagataaaatgatagatacaccgaagagccaaaagaatcagtaccatcggtaatctacactgaaatggatgtactctcctgcatgaagacccttttgacaaattaatattcccttgagaatgatatttacttagcaaaaaggacaagtatggaaaaaatttcacacccctacactttttccaacctaccatgtgaaaatgaacacctatgttcagatttttgtttctggcaatatggttgactggatagtctgaaaacttcctgctacaaaacatttttaaaatatataacttaacttgaaagaaagtaaaggaccataatgcttgaaagtgaagaaagaactgggaagcaaataaaaagctgtggctttgggcattgccaatcacaagatgattggattttggttgctgcacagaaacaggagtcaaggactttgaattgaacacggtgagacttgcatcgaactacttgattaaagccagtgtcctcagagtgctgaattctcaacaaaagaactgaacagaaaaaaatttcatcctatgggagaagaaacctttgtgtatttggaaataatgcacttctatataactcacaaaagaagtcatagtggaaattagacaatataactgaaaaataaagaaaatacaatatatcaaaagttatgggctatgactaaaacaatgttcaaaatgggatttattgcaaaaaaaggttgaaaaatatgagctcagttactaacttaagaacttagtaagagaacaacaggaaaaattcaaagtagtagaaaaaagcaagactgacaaagagagaaggcaggaataaacaataactgaggtgaattaatcacacacaaagcagacattaaaaatatgatcatctttttgacaataattttgagaacttggatgaaaggcatgatttgtttaaaaaatacaacttgtaaaaatatgacttagggagtagagaacattgaaagatctctaactacttcataaattgaaacagtttttaaaatgtctaccatgaatcaacctcctcccctccctctacaaccaccaccatctaggcaaactgattttacaggcaaagttataccaaatattcaagtaacacgtaacttcagtattgccatatatagaatacactgttccagagaatggaataagcaagaatattctccaaatctttaacagaacagcttaactaaaatcagacagctgcaaggaaaattcgtaaaaagaaaattagaagccaggccactacatcaacttagaataaaaaaaaattagaaacgaatcaattagcaaacaaaatctacaatggataaaaaatgcatcatgatcaagtgagttttatcaccgaaatgcaaggataatgcaccactgaaaaaactattaaagaaattaatcacattaacagattaataaagaaaaaatcacacgataaactcaataaaaagagaaaacaaaatcaataaaatttaatgatcttttgtgataatatttcttagaaaagtaggaatagaaaaagattttaatttgccaaacatctcacacagtgagattaaatataatcccattaaaaataatcataagaaaagaatgtctcattttacattgtaccagccagaccagtaagcccagaaactggagtaagcaaatataaaggttaaaaggaataaccagttttctctatatttgaggttaataggtaactcaagagaaattacaactaaattatttaaaatagggggtttcaacatatttattatgtgtaaggtccagtaataaacatttgaaatgtaattttaagaggttagcattttacaatagcaactaaaatgtaaaacagtaggaataaatttaacaaaagatgtgcaagccttttatgaagaaaattatgaaactattgaaagtcattaaagaagaactaaataaaaggagagatatattgtatgcaatagaaaaagtcaaaatatgaaagatatacattatcttaaaatttatgtataaattcaaagcaatattccaatacaaattttaccggtatttatatagaacttgacaagatgagtctaacattcatatagaagagcaaaggggaaaaaagctgagacagctttttcagaaaagcttttgtaaaaaagaacaactcaaagagataccccttttatatatcaagaaattttaaagtaatagtaattaagaaaaggaagtattggtattaacatagattaatgaaccaattaaaacaaatagaaagccaaatatatatttttatatatattatacatatagatacacataacatacatagatatgtgcgcacacatatgcacaaacaaacacacacatacaactatatacatgtgagatgaggcctttaaaatcagtggggaaggatggacttttattaattatccatgtaatatccttatctttaattataaacaataatgtcaaaaatgctcttttgaatagaagatctaaaaaatccaaaactttccggctttatgaagaaaacaaagaaagatattacttcgataataaagaatttcttgaagcacaaaagtctagaacagtctaaggcattgttaataaaatgaattatagtaaaattaaacacctctgttcattaagaggcattgtgaaaaagagaaaaatcataagaacagactagatgaagatatttgtagtgtatagagacagtgtatagagatgacaaaagatcactaccaagaatatttcaatgctttctatgaatcaatagtaaaacagtcgaataccccagtgggaagtgggcaaaagagatagaaagagtgaaagacatatcattggccaatacatacatgaaatgacatgcaacttcataaatagctaagaaaatgatgattatagccacaatgagattctatgtcacagcttagcatgaagtgaaaagttgaatatgttgacaagtatatacagcaaaggaaacttttacacagtgctattatgattgaaaatttgataaaataattttaaagagagtggctattatctaataaacctgacaatggacatacactaaacccagcaattcttagatatgtatcctaggtataatattgcttatgtggagaaataggaatgctctacactgttggtataaattagttcaattattgtggaagacaatgtggcaattcctcaaagacctagaaccagaaataccatctgacccagcaatgccattactgggtatagtcccaaaggaatataaattattctgttataaagatacatgcatgtgtatgttcactgaagcactacttacaatagaaaatacattgaatcaacccaaatgcccattaatgatagactggataaagaaaatgtggtacatatacaccatggaatactatgcagtcataaaaaggaatgagatcatgtcctttgcagggacatggatagagctggaagccattatccttagcaaactaacacaggaacagaaaaccaaacactgcatgttctcacttacaagtgggagctgaacaatgagaacacatggacacagggaggggaacaacacacatggggcctgttgtgggcacagggagacgcatgtggggcttaatatctaggtgatgggttgataggtgcagcaaatcaccatggcacatatttacctatgtaacaaacctgcatgtcctgcacatgtatcctggaactttaaaataaaataaaataatttaaaaagaaaaaggagatgtgcacaagagtgttcatagttcattgtttgaaatggaaatatttgagataatgtaaatagctataatcagcaggatgaatagataaattgtggaaaagtcgtatggtagaattcaagtaataagaatgaatgaactatgctagaaccatttgtgtcattgtgagtaaatcttccaaacgtgttgagtgaaaaagcttcttggggaacaacacacacaggattactccaaatatttaattggaagtatataagtagtgacagtataaaggtagacaacgagaataataaacatttaatttagaatggtgctgtcttctagggaggaagaaggatataattgggaagagggacagagagcatttaactatacttacggtattacatttcttaagctgtattttgggcttatgggtgattatttactatttttatatttttggatatgtctgaattagtttatttaagaaaatcctcaaaacaaaaatgaaaacaagtaaaattagctctaggtgcaatgtacctattaagtatatctagccatttttaatagtgcttatttttaagacctatacatcacataccaaattagaataaaattatgtttctagggaaagacaaatgtccctgactcctgaatgccgactgcctttttaatggcaaatataatcttaacaaatctatttgatgccaaacagagggcacatatattgggcatattgtatgtgtgtgtgtgtgtgtgtgtgtgtgtgtgtgtgtgtgtgtgtctgtgtgtgtgtgtattttgagagagagacagaaagagcaagagctttgaattgatgaatacctgatgattacggtcagagattttacctatgaaagactaaaaattttctacaaatatcacatttagattgttttctctctttcttcctcctctgtccccgttcagctcaagcaataattttcaaatctctatccaattcttttgcatgtcagaaattattgctagagactgcaatgctcaaggactatacagcaaatccttctttcattaactctttaaattaaatgctatataaatataaacatgaaatgtcatatgactaggaacacaaatggctactctgtaagttacgtttgtcactttatggccaggtccattatttttttctcagtgcctcttctaatgtagattttagaaatctatttattgaacaaaaatgctatgcagcaaaaacatgcgtatcttttttttaaggatagagctgattgtaattcagcaggaacttttctgaagattagctctcttcctgaagctacaattttcacagcaaatgtaagaataatttatccaacttctgttatgaatatgacatttcttttcttatatgtgtaccaagggcttaacaaaagcttttattatcaggtattttatctagattcaaagcctctaaagaaggcctgatgttaattattttgtatgtgactcccatatattagattaggtattctgtataaacagttttcatcttagtgttagaaagctgaaatgattacaactatgtattgatgttctcatggattattagattatatttaccaagtgctaattgttccatatcatttaagtagaagggcccttattcttttgtaatttgtatactaagaatgattttgactaagccatccttttcaggtttcttatgaatcaacccaggtaaaggaaaacaaaaagctcagtgaggaggcaagaggtgaccttgcctctgtatttttcctttcacgactgtgtaggacataggacatctctttgcagaatttgccagttttcccattggcgctatgtgtggaaatcatgtgtgcatgtccagatcagattgttcagtgcctgcatggatctttgtcccaagagccttaatataaacacatggaaacatctctctttttgctcaaaactatatactgaaagtcggtctaataggcaagccttaaaagttaatatttgacataatcaatgataagacactttgctgaaacacctataattttggtccaaagttattttccaggactctggggctgggcatgttttcgagaccaggtttcttagagaagggtctgcattcctgcatttgacttttctctgagactaaagccattgaaaggatggtaacaggactgcctttcccttcaagacacaaggatgtggtgttcataatcatttctgatgaccaagttgtctttaaatggatttttttttctgactccaggttcatttaatagtggtaacaactagaattcctgatgtggactgggggtatgaactgtatataggaagattccattcacatttcccctaatgtggacacttcagactgttagcatttggccctgccaagtgcctcttttttccaaactgtttcagggagcactggctgccctcatcctcttctttggtaagttaactccagctccttggtaactctagtagaagttgtcttcaaaccatagcccaaagtgaatattttcttctcaatctctttggaattatttacaatgcaatttcattgcaacctacgtagttagttatggacaacttataacttatagacagcttttataacttatagatacttggacatttaatttgcctaaactctctgcagacaaccaatatctgttgccttttcaataaatttatttcctgatatctgtagctgttattatgtagactgatggtctagatatagttccaactttgttactcaaatttttactaagctaccagaaactgtttaaaatagatgactactgaaatatatattttgcacagaatcccattatattagcatattttgttgactgcaatacagtcataggtcattttaggctctctaagtttggcaactctacgttgtcaaaaggaaaagctgtctggaaattgtcttgcctgacatgacaaaacaatagagaatgagtaaatactctcattaggtatgtgtaaaaagaaataaaataatgagaaagcaaacactatacacacacaataatggtgtgactgtgactagagtatagatagtcagcaactatctatacttccaaaaccggcatcacaaaaaagagagccttctccattgctctctgacttagttccctcttccactagggcttatttgggggaaaacattattttaaattactgctatatcttaaatgtcgtcccatgtatatgcattgcctactaaaatagaaaatttgaaaatgttgcatggttaatgtgttattccttttggggaatagaaccagaagaaatgagttataattccatatgaagaataaactttaacctacaaactcagcaaaacaagaattatcaaattacatcattttctttaaatcaactcaaatcttttctgaaggaaattttacctcagttgttactgagattctctctcccctgcaatattgtacaaattccctggtttctatgaaatatttaaacatggtagaatctcctccagttttaggtccccatctttcacttctgaaacgttacttacggagcccgcatggcctgttcagatctcccattgtttcctccccccgaccaggagaatttccttatgtgcatgacacagctcccatctactgaaaacagacaccttgctgaataactgacacaggcttttcaaggacatttcccaatttcagggtcatgtcttttttctctcttgctgtccctagaagaataaattttattcattcctgtgtagcactcttgggctaattgcctcaagaagtttagatgtttgtaaaaagcagtgagaaatgtttagtctcagaagcttctgctttcagcctggcaaaaatccctaggcaaaattgaacagtcttatcaaaaaggatgggagaaatatatcaagatagcaagcataatttaatagcttaacaaattaacctgctgtaagtatatctgggttgtttattttcagagtaattccctagtcaatttgcttttgcaacatagccaggcatttatcaaaagtggtgattgtcatgatgtcttggtttgagtcttcttgagaagggcgtatagattgttaacatcccttgatgcctataaaacttacgtcgtggattgaggttttcatttatcttcagtgttaaagtgtaaagtccttgaggggagggtcagagaagagtcagtatggttacctattgcacacacatgcccagtgcatgagatagagcagttcttccatatactgttttgaaaaaatgaataaatttttgtaacttaatatagtacctagccttattgctttccattgcaaaacaacctataacactgctcctaatcactttcacaatgataaggcaacttctgaatcatcaaaggcagtttcaactatgattgtcataaattgtccatatactgtatttaattctaatttcttaatattagttatggatatttgatggaattttatgaaattttgccagcacagttaattttttgttgactagaatgcttctgtgacagaactatgctcttttaatgaggttttcatccacatatgcttacgattaattttcagtaggatggaaaatattagactgcaatggtgaaggggtattttcatttacaggagctattttgtatcagcatttttcaaagcttaacttgaatctcatgattagcaatgaattggcttctatgtaatcactaaacatcatttattaggctgttcttgcattgctataaagaaatacctaagactgggtaatttatgatgaaaagaagtttaattggctcatggttctgaagtgcagtgctagcatctgcttggcttctggtgaagcattaggaagctttcaattgtggcagaaggcgaagcaagagcaggcagctcacagggtgaaagtgggagcaagggagagtgagagagagagagagagagaatgagaatgagcagtgggggaggaaagtaacacacacttttaattgaccagatcttgtgtgaaatcaaagtgagagctcacttatcatcaaggagatggcccaagccattcatgaaggatctgaccccatgatccaaacaactctcaccaggccacctccaacactgggggttacatttccacatgctacttggagcagacatccaaagtatatcacgtcacaatagttaacttttccagattgttcaaagatctctaaagaaagaccatatttacaagaagaaaagttcacttattacatttactaacattttagtctcttctcagagtactctgcagaagatctaagtccactctacacccttgttcctaaaattatgcaggatcttttaaattatgaaatgatctaccccttcgtaactgtgagaatcatctgttattcaatcacatattgcatagactctttcaatagcattctttctagtataatcttgtgatgaattggactcagtacagttcctgactgtgttaccatgcttttaagtacacttaatattctgaataggacatttttgctttaagtagatccttattatttttaggtgtttgttttgttttccttaatataattatatatatatgtatatatttccagatatatcttagaaatgatgggttaatcaatttcattcaagagtccaatatgtctttggtctctttgagggaacgtttcataaatccagattctctttttttatttctgattttctttcagaaattacttaatttgaatgtgatatgtattttccactaagcttatgtttaaatcagtgtttagtattccaggcatacttttccactagtgaatgtgagcatgtcctcagtaaaaagtaggccttctaagtatagacaggttgtttaaacattgacgtgtgcatgttttcaaatcatgttgaaatgtttgataaatatttagatttaaaataattatcatacaaggcaaaacaggggtaatcccaaaattttaaaagtgattcacatctctccctccctgactgcctgttaattatactctatatttaaaggacactactttttcttgaaaaacagcatttgatggaaaccaagcattggtgagcagatataattaaaaagtaaagagagtgagagagtgaattgcaggctacttttgttttgtatccttattaatcaaatcttagtacttttcttttatcacctatgcaggactgcaaaaggaagatagttctgcgctcacaacaaggattaggccagggccttgatgactggcatgggtgccactgctgtgcgtaatgtgctgcttcctaagtgggaggagatggagtcttgccattctgtggcatcactcagcaggtgcaaatgaagtatgaaatgaaaaatcccaacccacacaatgcacagagaaaaaacaggttgcattttgtagtcactgctgtgccaggatatttactgtcacagacaacgcagctccagtcaggcaagcgccccaaatctctctgctctgacacctgcaagaaaaatggtgtttcactctgcgctactttgcttatggtgatttccctccacgagtctctgtccttcaagaagaaaaccagttaaagtgtttaggagctcatgactttcttaacaggaaagaatgatgtgagaggggcttgggggttctgtttggaaatgtgggagattctcagaatggatgataaaatgtttttaaaattaggttccacatggaattatcatgctttttttagcttatgaaaaaatatcgtagctaatatttatgcttgtgtcattgtttgaaggttagcagggaacctactatcactgttgatatctaaggtaaaactgagtaaacaaaattatcttagttaattcaggttaattgatagcaccatgcttttagataattctgtcattatctctgtatctgtctcaattgatttcaatctttatctgctatagtcgcttcaagcaaatatttaattgttaattttaaatacaaatattaatacctctgggatcaggtttgtatcttcttagagtatactgcaggagataaagtctctgtctatttggagtctttattctatgaaatttgaatgctggatgtcaataagatgagtagcatggtaatatgtatagtaaaattagactaattttaacaaaaaggaagatgtaaaggagacaattaagaagataaaagctagtctattttaaccaaaacaagaactataaatagtttaaaaatcaatgctattttattacatacccaaaaggaaatgccaatataaaattagttagataagtgaaaatatcaaaacagaggtgagcaatgtggtagatacaggattgttagaatttcagattgtacatatttagggaagctctagctttctctctaagcctaagtttcctcatctgtattagagaataatattgataaaacaatatctaactcataaagttttatagggaataaggaaaataatccatagatagtacatagcaaaatgcctcgcttataataagtgctagactaataacagcaattggattcacttattagcaaactctagaaatgtttcagagaatacattaatctgaactttacagtttgtatttgaccataattatacattctaaatctgaataaattagcatttacacattttatttacatgtgatcttaataggaaaattgtatttggaataggattttaaaaacttaaaatgggaattagtcactaatattatttcattcttatatacaaaattaaatataatcaagtttcttcattttatgcgacttcagggaccaccaacttcctttacttacaaagatactctttaccacagaaatgtggtttatgctcactgcattcactgttagctgaatctggcaaaattcattcgtggaatctgattccaccaataagttaaatatttctttttattgatcatcttctgccaaacccaatgtcttcttgtcagcacaaagtgtaaaacttgtaactcatggcttccttactatctaaggtgatggttcttatatattggttggataagcaaaaatagcccatgtccacatagtgaaatataagagatattaaggaaatctaattaactagatttctgactggttagaagtatagaaggagagggaagtagcagactatattttaccaagtgttttactttgcttcctgggtaggttgtggtccatttattgagagaaagcatacaggagtaatatagtttggctctgtgtccccacccaaatctcatcttgtaattcacataattcccacatgttgtgggagggaactggtgggagataattgaatcatgggggtgggtgggggtttcctgtgctgttctcatggtagtgaataagtctcacgagatctgatggttttaaaccttgtataggagtttccttgtacaagctctttttctttttgctgctgccatccatgtaagatgtgacttgctcgtccttgccttccaccatgattgtgaggcttcccagccacatggaactgtatgtccattaaacctctttcttatgaaaattgtccagtcccaggtatgtctttatctgtagcatgaaaacagattaatacagggagaaagaacaaatttggtaggctatttgatgagctcattttggacatattgtttttgaggcaaacatgtggcatatatctaatagactttgaaaatattggtctatatatcagatataggttatagtgggttatagtgacatggtttagaaatgcaagtgtggtagtatttttttatgatcaataaataccatgtcctcagtaaccatcacgcacatagacaataaatgttgttgatgtatgtgcaattttcagaaagcagctctaatttcattccttgcttggaaactctttcatgatacatctttgaaaccacagtgtcattcagaaataaggctttttttttctttaaagtaaggagaaacagaactctgataattactaatattaaagaacaagtagaacacaaatcagcaaagggaactaagtagaaactgtcagcggtgtaagagaacaggagagatgagtatctcagaagtcaggtgaaattgagttttaagaatggggcagtcataaatggtagactggataaagaaaatgtggcacatatacaccatggaatactatacagccacaaaaaagaatgagttcatgtcctttgcagggacatggataaagctggaagccatcattctcagcaaactaacacaggaacagaaaaccaaacactgtgtgttctcactcataagtgggaattgaacaatgagaacacatggacacagggaagggaacatcatgcaccgggtcctgttggggggtggggggcaaggggagggagagcattaggacaaataatgcatgtggggcttaaaacctagattatgggttaataggtgcagtaaactaccacggcacatgtatacctgtgtaacaaaactgcatgttctgcacatgtatcgaaggacttaaagtaaaataaaataaattttttaaaaatggggcagttaactgtcaaacagtattgtaaggtgtgggagctaaataagaacacaatagagaggaacaacacacactggggcctattggagggtggagggtgggaggaggaggggataaggaaaaataactaataggtactaggcttaatacctaggtacagattatttcatctgtgtacagactatgacagaagtttacctatgtaacaaacctgctcttgggcccctaacttaaaataaaagttaaaataaagattaattatatgttttcgttttaatcaagaaatcatgggtggtatttgccgcagcaattttcttaaactattgtagtggcctgaggaaggatgaataactggaaagtagacacagtaaccatggagtgctctagagaggagtggagctatagaaacagcaaaaggaagagcatatgactggagagaagtaaattgtgaggagaaattattttaagatgacaaagactagtcatgccagaatgttcttaatctctagaaatgatctagaagaggttgccaatgtgtgtgtgtgtgtgtgtgtgtgtgtgtgtgtgtgtgtgtgtgtgagagagagagagagagagagagagagactggctacaaagtcttacaggataaaaacagcacatgtgagaactgcaaataattaactttgattcagaggaaatgcactttccataagatgaaagaaggtaaaaatgtaaatagtacagtaaaatgaaaacttgaaaggctttgcctccgataacattgatttttttctgaagtaagagacatgacttatcctgaaagggaggcagtatcaaaaaatggcatgacttttactgttgactaatagggaagagacattatggaaacatacaaatagataaagaaatataagtgctatggaggacaataaggtactttgaaagagaataacaggttgcataattcagactgagcattagggaaggctttcaattcaactgatgcctaaagaatgagcaggaattaggaaaaaggcagacagcctatcacatcagcaaaaggaactgtgatacttgattattaatgatcatgtaaatggcattcacttccttttgtattaaggtcctactggagggttgggatgaagtcttgtttttctaccttcacaatcaagcactatgatattagttaaaagttgatatatctctaaacctcactgttcggcagatgctatcaggccagtttcatgtggaaactgaagctcagtgaggttacttctccagtgtttcctgggtaggcagtgttaggattcatcgctcaggtctctctgatgccacagttggcttgatcccatttcctaggctgcctcataaataccttcttctaggacacacttacttgaatgatttcttccctttctcatgtttatcatcttcctttgtgcccatttttaagactggacgtcactcagacctccgtctatggctctgtactcttccctcgtttttccatactctttgatgacaccctttatgcctacagctttaatgatcacatctagatttctgattcctatgagctgacattgcctcaaattttatgtgtcccaaattgaacttgccatctttttgtatgccccaatggctctcctaattcgtcagcactctaatgcatcttgaaaacatttttgtttctttcctcttttttgaaaaacaaatctgtcataaagtttcccagtgaaatgaaaattacatttcttctctcttctctacacactagctcaggctgaaggaattacatgctgcaataactctctgctctctgtgctccttagagttgtcattatcaaatacaaaagtctttgcctggctttcacggcaattcatcatgtgggtgccttcctttcacttgcttttatattttcttgccacaaaagttcttttgtaaacatcggatattgactttaagagcttatacaaagtcttttttaataggtttttgatgcagtgagcggtaaatggtgtttgttgtctgtaactattccacacccttgctgagacttccttataggtggagcatacttcctcaatccactgacctgaatcttgaccatgtggcttacattgtccagtgaaatataaggagaagttcagtgtgacagtgaggagtgcagactttcagatgcaatgagtgtttcttctcgttgttctgtgctcctgtcctgcaccataagagcatgtcccaggtcatcatgttcttttgaccaggctcctggaatgagagacgcttggagctgacctgaactggacctctagaagcagagatgctgagaacatctgcagatacatgagtaagatatgtgcacttgctttttgtaaactactgagattttaaggttgttacacagcatcatcatagaaatagctgactaacatacaaccgttctagaaaccaggtctataatcacaaaaccaatcataaccctgaggtttagtttcttcctagctagtgagctttgggctaagtgttttgaagaagtgttagatcatagttacaaaggacttcttttatgtgttgggaaagctgggattctttatttaaatatcaaaatgatcttaagtttgttgttagacatattccagttctcagtagaatttaaatagcagaaattagctactagaaatgaagtcttttaaaagtagaaaattagtagaaatgtgtataaattaatttgatagaaattaggttttgtctgaaacgactttctgattaaatcttctttggacaagatttctggaggtgcatcttgagacacacagacttttccttgcttactcttaaattggttcttaagttttggtcttttaaatatgaggaacagattatgcttagatcctttatcaacccttctaagtctacgaagccgtgttttcacagaccatctaattttcataagataaacttagtttcttgattccttttccaaaacagccattttctaaagggtttccaggaggagttatttcttgtctctttttgtggtctttctagggtcctttataagacctcattactaaagccccagaaaagacattgacacaaaatcaagtgacttttcaaagatccatgaaatagtgtcacagattatctttgatgtgtgactgtaatttgctagagaatcataccaggttaatggcttaactctctggagcctattgaatttatgcagatacagggctctcaactatcaaggtctcaactggaaaagagagacgtggaaaagtcaagatttcatgtttgtgaatttattatcatattttttttccacagtggattgagcagtccctgagtcatatactctaccagagaatgaatgatgtctggtaaataagatgatgaatctgacacataaaagtactgagggcccagtcaaggcaatatcactggctgtgaaatgctgaagagaatcagttgaaagagaaagaaggtaaacgtattagactttcaaaaaagcatatgaagtagattaagagaattaattggaaattattcatccaaatggctctcaataggtaaaagtagaaattattttataaatcttttggaagccagtgtgaaacattgtgtcaataaaggtaaaatggaaggtggccatcagagagcatgttaggacactgtaaaaatgtcatatcctgtccctttgttcaaatgagaatcacgttatcactgacattggagttttttgatgccaaattaatacatagttttcttatttgtagaaattctaaatgagaagagcctcacttcttttgatcctgtggcatgtgggccaagcctactggatgcctgtttttgtaaaaaaaaaaaaaaagttattgtaacatagatgcatgtgtttgttagtgtactgcccatggatgctttcatgctagaaaagcaaagttgggttgttgcaacagagagtatatggccgtgtaacctaaattttctaatatctgctttttagggaaaaatttttgcttgcctctgctcaagcacaatggctttcacatattttgattatcctaagggaataatatattttacatcgtcaccagtgcatgagcacccacatacaagaatatatctgggaagacatttcatgcaatagttgctactcaacaagccctttttttccctctgtttaattctattctgtttcagctttgaaacaatgctgctaacccttagctgctttaaaatatttcaccctctgcctcgggactatgaaagcaatattttctgcaaatgtcaatgtcactcatctgtttagagtattgagtttagcttagcagtgcattttatataaaatagaaactttattatctttgttaatgttagcaagcaaacaacaaaaaagttggtcagacatctgacatattgcaataagggaaaggattgaaagggacaagatgcagtctatgagaatattggaatgctactgacttaatgacctaacgttgtttgcaaggcttcctcaagaacccaattaatttcaaatgggtatcttacattcttgagaattttgctcaactccatttgttattgctagtttttttatttgtagattgaacaagggcttcacatataatacatacagatacaaatccaaaataagatataaacttgaatcactgtcaaattctttactttctttcattcttttattcatttatgtagtgaacatttattcatcgaggccaatctctgttctaaacaccatgcatatctgtgtcactcacaatataatgatatccttatgaagtgtactgttcaatataagagacacaaattaatcaaataatcacataaaactgcctttgtgataaaagctatgaaattgagatacatgtgctatgaagtacataatagggcaatttgacctagtcagagaggtcagttgagatttccatgaaggaatagtgatagggataatatcacaaggaatttcagggctgaagaggacagggatgagtgagctctcacagtatgataatgtatgcccagaaatatactccagctttctccttaaacattgctatttttttcatttctccagcctttctctggtggtatttacaatcagttatttatcttttttcccactgcctttagtccacaaaatgaagagaacatagtttaaaaattctattatgtgtctatctatttatttgaatatttccatataacatacttttacatttgtggaaattgttcctgttcatttggattaagtcctagacagtttccctaaatagctctgtaaatcatcatgaagacatgaccttggttttcaatcagcttatatttatggttgggaaatgattccttgtgaagccaataggttcagagtcactgaccaaggatttatggttgcgcttattatgacgggcttggactctagaatgatagcaaggtaaatccactgtaagaatggattttcttgttgagatctaaagctttacgttttttttaaatctatagaagtctcatttggtaaagcaactgaaaaacaaatcataacttttctttttcatgcttatttaaaagatacccatctgcttagtttctgatccttaatatgttgacatgactagaatgtttttattttttgctaacgtaaggaatggagcaacaaagagatttcaatttatacagtttgtctttgtaaccatactcccatgtgagtaatgtgggataagcaagacagttgtacagctgctttgctagagatgaagagtagaattttactgtaggaaaaatattgaaagtgctaatttggtgcacaaatctatagctagactcagtccaagttgactaaatgggtaatagaataaaatactaaataaagacaaatgtactagtaagtatcagtaagtagtaagactgtattccaatttttttctcaatagagtgataatattttagtaatttatttcaaaagttaaatagataaaagaatttgtgaaaactgggtttcaaatataagagctattaatatccacatgcagagcaaggaggctaattaaacgtttttttttcatcctcctgtaccccaatgacctactcttctaaggaaatgcatagaactatagttaagcaaatataacttgtaaatgtctaaaaaagattacaataaattcagtgacctagaaatctgctttaccttgggattattgcattagtgtattgcttccctcagatatgatgtgagtgttcaaaagttttccttacaaaagtcaagactggtctttgctgctaaaaagaacaacacaggaaaacattacagccctttttttcctcctctgagttacaatgctaggagagtcatagaggcctgtcaccacgagatggcgctcagcttccgtctcaaaaagaagtgagttccatgtttttcagcccctacttattaccattcatttcaaggagtgaaaaacagtgttcagagaaaaatctttgttagcacaaagcgtctacatttgtgagagacaaaattatgtttctagttcattcaaagactagttgctaatctcggaattttgcaagttaactcacaggaacatgaaaaaaaaatcctacatttattggttaactaggcacactcatttgctttttatcagttcattgatgttttatggggaagcatggaaaaggcagttgacattttcatgcattttgaaggaagaataaaatggctggttctcggctgtgcttgttcacaggttttgtaagccgaggaaatggatactacggttgtttgtaaaaccggatccaaacaaaggaagagagcaaggatgctttcctgcaacattgacacatgtaccactctctagaaaaaggatgaggctgcagaagaaggttttagcttagcatttcaattctaaaatggatggtcctatttaattttccacatacaataactttcctcgctgaagaatagattaatattactaatctcacttatgtagcagccttaaaaggccagaccaacacggatatttctaaagcagattgtagtcatttctgccggtatcgtcaattccctacccacactgaaagtcattgtgttggtaatctcacgctattgcttcagtaggcgtctgcgtcattctttgctctccgtgagctatagacaggcataatggatgaagtgatgagagggcacaatgatgaattaatatcccagaggtcctaaaactagtcacaatgaaagaaggcttttctgtggccactgggttcctggagttgtgttatgaaatgtgattctggggttgtctgcttgctggtattcctgtagaaggatagagggaagagttctctcaactgcaggagaaaaagaacaagaaaaagcaagacatacatgtactataatgaaatgggatcataactatatatgtgtaaatatatacacatatatacacgcacacaccaggtttttgtataaataaatgtgaagttttctttttatcaagctttgcactatataaaacatctacactggttgcagctttactatttgtttttgcttggcattttgttatagaaatagcatacatattagtggtacattaagctgcttcttctaatatatgtggattaagcagcagaaatagcttttctattctttgccatctttggaagtgttattgtggaaaacaaagtcaaagcagacatgatgagccaatgtcaattttgattataccttattctatttgttcttttatgtattttcaaactctcaccgagtgccaccttacactaggcacagtacatgacgctgagcataaaggcgggaaagagatcacagttccttcccacaaagatgcagaaatgaatatgactctacctgcaatagtgcagtattacatgaactgtggtggaattggaacagtggcatttagctcaatcatagttattagcctaaaatatttcaattaaagattaacttactaccaaaaatatgtaaaaatcattttctctgcggggacaggataagctaggaaagatgcaagcttagaaagaaagagcatgagtgtgcttcctttgtctgagagattattcccttctggccagaagagggttggggatggaactcggaaagaagagtgcacagagaagcttaaccagtgttttgctgttctcgcatcatatatttataatgtgtttttacagttcagtttgatgaattatgtttttctgggatgaaaatattttcacatccaaacacaaaaatgtagttaaaagtatttaagggaaacataaatagttaaaacagccagtttaggcaactcatgtactttcttttctccattcaaacagatatttgagaattcactatatttcacaactgattttcactccctgtatattgaaacaaactcatacatatcttaatgacatgctaatctgaaataatgagcctcatatataatacttgtgtcctttaaaacgaatacataaccatatgctataattttgtggtgcttgttaattaacacaagtagtcctaaacttttcaaaaacgagggagtagacaccatgatgtgaacattaaaacaaataaatacacatacattatatagtgtttagttcatgagctggtttgaaatttgctccatgattttgataggtcatctgtatttgctcttgtgtgaaacactttcaataacccttattggtaaagcacttggagatcattggttgaaaagtgcaattgactctgagtgctggcttcagagccttacaattgagagccatcataaattttatttttgctggcataaatacggagatcttttttatgcagagagggagctcttttattttgtaaacatttttatgctaggtgcttcagtaatgaatcttagatcagtataaaaattgtttgcaataataatctatataccagtctctatgtgatgttcttatagctttctctgcttgccctggaataagaaagcattaatattttgaaacaattctgtatgtgtgattgtctgtttttatggtaatcagaatacaaaagataaaaacacgcaggtttattttgaaaaaaaggtgtttacttgagggatcttttctgatagcatagatttctgttagctttttaaatttaaacaagtattctgggataatattaaatttatcagccacagaaaggggagctttgtagttgttggaaatcctgttttatcacctatcacccagaaataaaagaaatcttaaaggataaaggtagaagtaaattcaattttccttggtatcaagttaattttttcaatcagaagttctttgagcaggtgaagaaaagacactaaaagaattggaagctatagtaaaagccctgatgaagaatacatcataaataactaacaaaccataaatgaaaattgggtgcctttaaggcgggaactactaacaggctgccaggcagcatttgacctcttttaatggaaattttaagagaggactcgaggtgatgaagggtcattgaaccggatgtcaatggctcctgagtagtactccaggtgggctactaagctcattctgaaggatgatgtagattggggtgcatcaatcagccaggcagaagtcaactccctgaccagttcttttctgtagtagttcagacactgcacaaagtacaggaaatcaggttatttatttattttgggcttttattaagatataataacaacttcttatatttgtttagtgtgttatattcaagagcccatttgccacctcaattcagtcagactatcaaataagacatgttttaattttccatcttcatatatatttctatgctttatgtgataaaaaattacaatttatctgggatcagggcaataaaagaaactgatcttttgcaaatacagtttgctcttatgtataggaaaagttagagagaataaaagccattaaagttgtgtataaaagatacattggagttacatttatatcattgattacactgtttctcaattacacagttttgaaaaaaacacaagcaattaatcatggtagattacactcagtttgtatttggtcagcagtagcaagtagttatcaagaagtctgagttccaattgtttctctaaataatcctttgtaatatcttttgcttatgggatttctgtaataccctttagtaaatgtgattatttatatctagaaaacattttaaaatagctctcattcttttttataattatacttttaaatatattttaaacgtattatatttttaatatgatgccattacgagtcctgccatttgtcttgtttaatctgaatatgcataattacaaaccataccaattaaaatcactatacatgcattattaactgggtaaattttaggagtaaaaacaagattaaaatattcaggcaaaataattactcgtagcttatgtaaaagaacaacaaataagaactggaagttattaaaatttttattttaaagaaaagcagtagttttatatagatgacacaatttagtattggtagagggcaaaatttctatcaataacaattcttcagatataattttctttagcaattggaaatattaaaaataactttagatattggccagatatatgacatttatatgacctacttgccagtattgaaatgatccactgacaaaaaaaagaagatatactattatgacttttataagaatttaagataccagtactttattatcctgttttatttgaacagaaaataagaaactaaaaaacaattagcaaggccggagagtattttagattaaactgatttgaaatatgtagttttcctttagagactgcaagccattggcaatatggcttgaaatgagtggcttaataataaaatgtttctatccatgtctataaaattctaggcaacaaaatttagccatgcatttttgcattaaacatgaactatatcaaactgtagtcctttcagtggggtcctgatttgtccagccttctttatcagtcgcttgaggatcttataagctattgagtttagagtttttaaggtgtgacagatgactccaaatggctcctctgtagctaaaatttggagctataacttgaacttaaaatttgaagttatatcttcaaattttagctacagagtataggctggttcttacactcccagcctctaccagggggaaatactttttgtatggccatagttatctgaatatttaaactgaattcaggaaaaatgggatatcctgcagtagaccgaacacttcattgtaactttgtttttctgtagcttagtacagtgccctgtaacatgtaggttcggaatatatgttcattgaatgattgtatttacacttactaaactggttctactcagataaaggtgcccaaagggtcagtttgaaagtgacagtaaatgttactagcaattaattttatcagagaagatactagggattggaaggaggaagagatgaggaaagagaaaggagaaagaaacaaaggtaagcaggaaaaccaggggagttggacgtgtccttcaggaataggtaaaaattcaatgtgttcaggtggtggacagtatcaggctaaagctggtgagctgagtgtttgaagtttttagaataaattcagggtatttagtgggtgctcataggagatgaaactgctttaattaatggaagacagtcaataactttttgtttagttttattgtaagttgggatgaacaaacaactcctttccttgtaaagtctttggcttacatttatccatatttcatgtccatagaccaaaaaaaaaaaaaaaccaaacaaaaagactttgtattaactactagaacttattgagcaactctgtaaatatcaggtcaagaaaaacagacaacgattgactagacatttaagaaaagcaaatgacataattttacttcagtctcctgattttcatcggctcatttctagttttcccagtcctggagaggtggatcagtgcagtttgacatagtgccaattccggattctgttcccttctgcttggttcattctttttgctctctgccagaagtcggtattatttgaactttagtccaagtacttctcatctctctttatactttcgtttctcacagtatcaactctcacttccatgaagctgatttccaagtcgatctcaaatcaattcttcctatctccttatctatatttagaacaagcactgttgtatatttacagaatggtattgtagggatataaaattaaaccttataaatgacattcttttgttaacaaaaatctttaatttctattttttctaattctctcattctagtcacttagactcaaatcttcaaattatattttatacaattaactcttttgatagctactatgcctgttcttttattctcacattcagtactttgtgcctgggtttgtgaaaaccatcttaacttgtactccctcctctttgaaatatcattctgtacatcagacaactagtagacaagtgtagccaaccagtttttctacaactttcatcaggatatttaagtttatcttcattttggcttcagcttatttttcgagtcctaaaatattttttaatttcttcacttcagacagagtatcccatttacttaatcaatgcattttgccttcatacctttatctatatatacataattctttctctgtaattatcctgacactcttctctgtgtctattaaccctactcatttttaaaagtctagtacaaatttgaactacttattgagttttctatattcagcctagagttcaacctagagttacgcattttctgtattttgatacttttgacattttgcaggtcggtctgcttactgttcttcagctatcattttgtaatcaggtatctataaaatgtctcaagctctttctcctgcctttatacctccttcaattttaccaaacttttaatgtcagatctacgagaaaatctggtctagacttaagttacttaagtcaaggactgtatctcatttatctttagattgctgacacttagtgtagtctctggcatgtcaaaagtacttatgaatacttgtaaaataaatgaacaaatggcctttcacaatgaaaccttccagaatacacccaatcaataccgctttcccacattccaaatatcattctattagctttcatatagccatttgcttttttgattagcttttttatatagccatcttgatatggttcggctgtgtccccacccaaatttcatcttgaattgtggctcccataattcccacgtgtcatgggagagacttgtggaaggtaattgaatcatggggttgggtctttcttgtgctgttcttgtgatagtgaataagtcttacaagatctgatggttttttaaaggggagttgtcctgcacatgctctttcttgcctgcccccatgtaagatgagaatttgctcctcatttgcctttcaccgtgattgtgaggcctccccagccatgtggaactgtgagtcaattaaacctctgttcctttatatataacccagtcttggatatatctttattagtagcataaaagctaagtaatacacacgtagacttagttctttttttaatttttatttttagagttggggtctcactctgttgccccagtggagtatagtggctgtcatagctcattgcagcctcacactcctgtgctcaagcaatcctcctgcctcagcctctcaagtcactggtggcatgagcaaccacacctggctctaaattctttttttttttttttttaacaggagtcttatctgttgcccaggctggagtgcagtggcacgatctcggctcactgcaagctctgcctctggggttcacgccattctcctgcctcagcctcctgagtagctgggattataggggcctgccaccacgcctggctaattttttgtatttttagtagagatgggttttcaccatgttagccaggatggtctcgatctcctgacctcgtgatctgcccgcgtcggacccccaaagtgctgggattacaggcgtgagccaccatgcccccttaaagtcttttttcattttaatgttatttttcttaactaaattgtaggaacttgaagattgatgattatatatatcccacagtgcatactttacccagagtaagcacacagtgtataattttggaaaatttattttttcatggtgttagtgttttcatgtagtacatattttacatacatatacacatgaagagttcagtatgttcagaactttggagactcaataattcagattatttatttatgtttttaatgctgctaattcatgaaaattaccgaggcatcttaaaaataaataggatataaacaacatgatttactaaatcgaagagaaatcaaaaccaatgaaaagaagctgggatagctactattggacactgcagaatgaattactgtgcttgagattcaaatttagctttggttcagaaagtaaggtaaaacaagaaaagtacttaggtatgtagttactttattctgagaatatacctttaaagataaaattaagcacacatattcttctgggtattgaattttttaatctgttattgaattaggaaggtgtttatttcatgtttataaataagcaagatatataattgctcgaataaacatttcttgtgttggtcctctaggaaatttgagggctattacaaatttctgaaaaacctaatgaaaaggcactgcgggaaaaaggtgccactctaagcaactttggaaaggaatggaaactaagactgatggcaaaagccctataagcactctatgagctgatgaagactatattctagttcataaagttgttttccacgggaatatggattaactattttgaaccaactatacatgaatcctggaactgaaaaattaagtaatagatggctgaaggtgagagccagttttctcacttttgaagtgggaggtgacaaacaaacaaggggagaaacatggatgcattacttacctataaggtagttaatgaattagagttggagatatcagtataaattatgtttagctcaatatagataaaaatagatacatatagaaatatttataaatatatgtgtgtatactggttagtatacacacatatattcttttactctgagagggccaagaaacaaagatattccagcagcaacaggcatatttgggatctagaccttgtttctaaaaccgtcgtccaatgaaaagaaccatggcttcctgaagaaatgactggttgttgggcaggaaatatataatataatcctggagcatcttgtggtgtcaaaatttaaagaagtatccaaagacccatatacatacacgatcactcacccaataatgagggtatggggtatgtcaaagggacatttgaaccttccgaaagctcttaaaatggcaaaatccagtacatgtcgaagaatcatgaacatatttaatcatatcccagagtatcaaataaatacttataagctcatcctgatataaacaaatgactggataaataggttcatggagaagaatacacaaatatactcttgcataggaaattccagataatttatgaagatattctgctctcaaggaggtggaacataagcttacattcctttcttatggattggattaaatggcttccttccaaagaatgcagtatggaaaggcagaaaaaatactaactttatagtggaaaaacctgataaacactgcctcttccaaggggttcagatcaaaacacaaccctgatgtcatatgcatccttaatatgatgtgataagaatggcactttacctctgttgtcttcttcttactcttaacttcagtctaatcacgagaaaaaatcagacaaatcccaaatgagaaacattttacaaaatacctgaccagcactcctaaaaactgccaaggtcatctaaaatgaagaaattctgaaagtgtcaaagcaggaggtgatgaaggagtcatgatgactaaatacagtgttgcatcctgatagaatcctggaatagaaggagaatattaggtaaaaaataagaaaatctgaacaaagtatgcactttaattaataacagtatgtcaatattgatgagctaatcatgacaaatgcaagaggctaatgtaagattgggtgtggggtatatgggaactctctgggctgtctttgcaacattttcttaaatcccaagctattctaaagaaatgagattattaaaaataaaacttaaagcttaaaatcaactcatctctgaaatatgtgcaatcctgagttatgattcagatatgttaatttattatcttgttacatgtcataaaatagggaacaatgaatatatatcatcgccataagatactctcaaacactagatgcactgtcttagtccatttgtgctgctgtaataaaatagctgaaactgggtaatttgcaaacaatagaaatttatttctcgcagttctggaggctaagaagtccaagattcaggatcaattaaggccagcagggtcaatgtctgccaaggactgctttctgctttaagatagagtcctgttgctgtgttctctggaggggatgaacgttgtgctctcacatgatgaaggaatggaagagaaggatttaccctctcaagctcttttaaaagattgtaatcctatcaatgacagtggagcctaatcattttctaaagaccccacctcttaatactgttttgctggggattaggtttcaacctcattttggagggcaaacagctaagccatagcatacactgaataattttttgagaagggctggatttcaggaaagttatagtgaatttcaccattgaattttgaatttttccaaagaccttatatcttgcattgacatataaagaatctacaaagaggtagacagatttgactatggagacatttttaaaaagtcaaagaagatcataaagtgataatgcaaagggaaaattaggagcacatatgagaacatgtgagatatgagaacaatcaagttaatttatggagctgtcaaaacattaatatgaaaatatgaaggttctgttagaatatgaaagaatatgatcaaccaatttataagataataaacagtccaaaacttaattatatatttaatttttccaggaatttaataaatatggatgcaaaaaccacagatacaattatatgtattcaaataaataattaaagattaatactcagtagtaataaatacacattaccatgtgtaaattcttactgttttgggatctgaattggcatatttctagaataaaagttaaataaattaataactttggactcctaggaatgcattcatagagaataattagaacaaaaatttcaattaggcatgcttaacagagctttatttgtaaaaaggaaaaagtggaaacaacctagataatcaacggtaaggggctggctaagtaaattagactacatccatgtgaaagaatattttttcagtatgtaaaaattatatttaaagcagatcaatgctaagtaaaatatttaaagtaaaaatatttaaagctaaatcaatgctaagtaaaaattatagtataccaaattgtatacaaaatataattcaattgaaaatgtaaatccaaatagtaactggaaagaaatacgttttagtagtggttatctcagagaggtgaaattatggtatgatttttgcacttctcgaatttttctctattggacatgtatctatccctttattcataataagaaaagtattatttaaagtaaacatactaatatccacataacatgcataagcctctgtgtgaataatgagaagacacatgggaaggggctgtgataagtcatagaagtctgtaggagaaatatacttaaattttacttcttacaaaatagagaggcctttgctttggagtttgggttaaaatccaacatagtaatgacctctaatatagtgagagggggaggatttctgtgtgtttgttcaatggtagggccatgacatacggccttaaactttctcctctgctcccaggagcagatcaaagttttgtgaaggttcaggcttatacaattttggcagtcctttataaaaagtaatgcaaagttattaatgtaaagtttggcatgggggtttggaaatgacacaaaagagtaaagggtcctgtaactgcagtattattagccacgtggtaaatatgtctctgttgctccaaaaagtgaggggaattttccggtaggctccaaatttaaacaggtatcagctcttccccttcatccctgcacaacattctaggtaactcaaggaggtctgtaaaacagttacagccacagttgtttccagtactattaatactttctaagtatcataatactttgcttgccatagttcttaagtgtttagaagcacatacaaacctttgggatgtttagcaggtagtcaagagaacttcatttcctttgttgtttggctctttgctatgggatttatactctcctaaaatctcctgatccactttaatatgagctacacatctcagcacataatgtatttccaagagtcattttcgtcttctgctcacatggtttctggaagaccttttgtgtgtagacccttgctttctgtatgaaaggcaggtcattgaaggagtgagaaccagctttcttcatttttctagatcgtcattacttttcattaaatgaaatcagatggatttttttttcaatctgaaccaactaccttaaactactgaagatgtctttaggctgcttctcagtcttactttttaattgtgtgtgagttttcatgatttactgaatctttgtaggcactttcatcggaagttgtataggctgccttagatactgctagtaggacgttgctatggattcgtggttctgctaaatagttttgttggttatggatgcttttctctacaatctttccaaaatagttcataaaggaaatctaattccaaatccatctcctgcattcttgccaagtactttaaaaatgcaaagtctttacattcttacctatatttcccttatttgtgagttgaccccaaattcaccttagtactcactctgcttggcatctctcccagacctattttccttttgccagtttggcttgcaatagatcttaaagtataatccactccaagaattacttcatcaatctttgaaagttgctcagtctgcactttttcctaagcatgtcccatcctatatttccactaggctgtgctttcagtccatcttatgggaaaaatctattgaattaaataggaaatgtgatttggaaagatttaggcctcactgaggtgtatgtaagctccttactccatgctacttcgctgcagtgctaagaatcgaaaattaggaaaaagccatagatatgtaaaaaatccagtgatagtctttcatatatccaaagaaattactctgaaaactaatttcgaagacattctaccatgtacttctgctgagctatctctttagcatcgagctaaaagaagactaaactatatatatttttcctttaaaaaaatctttttaggaagccataggtcttcggcctcttgctggagactctttaaacttcttttcactgaatatttcaaaatataaatgagagaaaaaaatttaaacctgtaacaagcaacatcttctacccccatggaagaaaattgaattctatggcaaaatacattggtagtttgtgtttattgcaaaatataaagccccatggaattatctgtaagttcactgcaaaccatgagaaagctgaattgactatctaaaaaacaaattgtatatttggggattgcaaggttcacaagaggaggacaactgtgagaaaactcatgagggatcaagaggccacaggagactgcagaatgttaagagagaaagtggtcacactgactgtgactgaggggatcttattttgaaacatgagtgtgtataacccatcttaagttaccttctgtactgtgcagtgatttactccactactgaagcctcaggaaagatgtactagacacaatgttttgtgataagtattgtggggaatttaagaagaaaagtgactattttctgataaaatcttatggaaattttcggaaatattgtagagtatgtgaaaaaattattaatattttaatgaacagaagcaaactcaaaagactatcccaatggcagaaggtggaattatttttgcaacaaagtaaatagtgattatatagaattataatccaaagaatatgataaatgcagataaattcatacttacataaataataaatgagtaaatgaaggagaagaaaccattcttccttataggtgcattccaaaaaatatgtgtagatgctcatatccaggaggtagagcttaatttcatgtcttttgagtgtgaactagacttaagaaattgcttacgaaacatagagtatggaaagggtaaacaatgactttatgttgtagaaacctggaagacaccatgtgaaccaagagatcgaggttaatattaccagtgataaatcatgttgctatcatccaccccttgttttgatgtaaggagaagagtgtcacacctctgtggtgttcttcccgaacaccctatcagccagtttaagaatgagaaaacagacaaactcaaattgagtgacattctctctggccagaattcttcaaaagtgccaaggttgtgaaagataaggaaagactgagaaactgttagagagttgagaaggcatagtgacatacatatggcgaaggacaatgtgatatactggactagatcccggaagagagaagggacattaatgaaagcactggtatgaagtctgtcatttagtggcattgagccagtgttaatttcttcattttgacaagtgtaccatagttacgtaaaatgttaatattaaagaaagctgggtaaagtatatatgtcgattctccatattatcaaaaataataatctgaaattattccccactaaaagtttactaaaatattaaaggtctgtgttacttagcataaactattttagactcactgcaaataaaaattgtaattcaacacttcaaattaacacacattaactaaatgattgtgacaggcaagtcttcattttaggtttctggaatacacgagtgaaaaaatacaaaaagtacagccctcttggggtgaggcagacaataaacaataagtatagtgaataaatgcattttactttgtgttggaaggtgatgaatactattgatgtagtttagatctgtgcccctaccttaatctcatattgaattgtatttgtaatcctcaatgttagaggcagggcctggtgggaggtcattggatcacaggggtgggttctcaaaaatggcttagcaccaacaccttgatgctgtcctcatgaaagccagtgagttcctgcaagatctgtttgtttaaaagtgtgtagcatccctccacttcctcttgctctgactatgtgagatgcctgttccccctttgccttccaacgtgattgtaagtttcctgaggcttctccagaagccaaggaaatgccccatgcttcctgtacagcctgcagaaccatgagccaattaagcctcttttctttataaattatttataaataatttttttttgcctcaaaaagtgacatttattgaaagacaaagaaatgataagatgttcatcccttggcttccttctctccccctcatgctgtacctcaacccaccccaagattcactctggatgtggctaggtagcaggacagcccccagcccctcagatgagatcagcaacattgaggggcatctcctcaatggaggcgttgtagaaggtctcgatatcttgaagagtcctcttgtcttcttctgtcaccatgttaatagccacacccttatggccaaaccggccaccttgaccacctttaaaactgcgattaacacaagaaaattgtctaaaataaaattttggatttgattcagataaaatactctaaaacccccagtcaaggagagagagaaatgtaatatttgtacatctgttcaatatttagtgtatcagatgtaattgtattaaaaatataatttacgagagatttctgagtaattctctaattcttgccaaaattagctgttgggatcagacattaaaatgaactcacttttcagattgaaacctcaaaattaacactgagacattatattaattatgaatataaaagttgaggctgggcgcggtggctcacgcctgtggtcccagcactttgggaggccgaggtgggcggatcatgaggtcaggagatcgagaccatcctggctgacgtggtgaaaccctgtctctattaaaaatacaaaaacaaaaaaacaaaaaacaaaaaacagccaggcgtggtggcagccgcctgtagtcccagctactgggcaggctgaggcaggagagtggtgtgaacccaggaggcggagcttgcagtgaacagagttagccccactgcacgccagcctgggcgacagagcaggactccatctcaaaaaaaaaaaaaaaaaaaaaaaccaaaaaaagaaatataaaagttgaaaactatttggtagattcaaaaattagcaagaagtaaacaaatataaagttcttttctcttttttaaagtaattttggggtcagcaaaacataagttctgtagtggtttgatagaacaatttcaccttaaaatttcaatagtaacagataataccttggttgacaagtaagaaaaattttaaataaaatctcaagttatgtgctgttgccctatcaataacattatattgttctctcatttttttctttgcctttaataattggtatcaaatttattgtctggatactaaatacgttgttagtgtattaatgacaaattctttcccaagtgatgatattatatacacagtaatccagtgcaattatgacttaaatattgaactaggtgttgtagagatcatatataggaatgggatatgaattaacagaaacttattttgaatattcaatgttatagaaatgtctatgcttattgacatttttggtaagaatttttgttaataaaatgcatttgggttgctacttaactgattgtgaattaacattatttgtgttatagaatgaattggaaaagcaaatacttctgtgttctactgtcaaatgtgatgcattcaaataagggatgttatgacagaaaaaacaaatcttcctcaacttgtccacatcagttccattccctcatttatagggaagcttgaggaatgtttagtgaaatgctggcaaatagacttcaagagaaagtctaattagtaatgttttttcttctaaggtaagtagagaaaaaaaggtaattatggaaaccccaagtttcgttctcaaatttaagcccaacttaaatatagtttaaggtctttcttcctttaaactcaccactcttactgctttttgattttgtggtggttcatccatattaatgtacctaatgacaggcactctgaaaaggtgagaatgaattcttttcctttgacatatcagctgaggatgatgttacaaagcatgtctttcaatgtgtatctgcatggactccgggtctgagagaatgatatatacttctactttatgcctgcaagattcaaaaggccttttcaaatattcatgtctttttctttttcctttttattctctgctggtatgtgttatgtgatgagaagaatgtcagagtctctggagtcttatttttaagttttaggcttgcctgaggggggaaatatattggaaatttgctggtcaagctgttcacattttctcataacatgtctaataattgcaatgcagtttgttcaaataatttagtcaggatttgcatacttagcatgattgactctgaagtgagttattgggcagtgcctggcattcaatcagtaacacctgaggagaacattgcctttgtgttgcaaccaagaagaagttaaaaaaggcacagagatgagggatcttttttttataaggggaattctgatcattcttctctgatcttgttttcaacttgtgtcttaatttcttcatatttgatgcctcaagttaataggatttgtattgccataggcactattgccatttcatatgctgtattagggaagcggagttgctgattagaaaagtgataatgcaacttcctcttctttctaaattaaccttggagtggaagggaaatgcattcatgattttgttattatactcactagtattggcggttgtttgtcctttttattttctgtggttttgaaaacttaacatatacatccatggagtatattacttagtgtctttttcttccatcacatttctggactaacttttgaaaaaatattttgcttttaattttcatcagcttctgaggctcatctatctccaaatcaaccaggaaaaaaaagtagaagaaaatcaccagctgttgggaaagttatttagaggatgttagccagattaatctttacataataattatgaattagtaacgtttctcctccataaaatccacatatttagtgagcttcagagaacatagaagaggcaagagaaaatgacagtgaagtgatgtattagccatggctctctagagggacaagactaataagatagacatatatatgaaagggagtttattaaggagtattgactgacacagtcacaaggtgaagtcccacaataggccgtctgccatctgaggaccaaggaagccagcccaagtccccaaacctcaaaagtaggaaaaccaacagtgcagccttcagcctgtggccaaaggcccgggagaccctggtaaaccactgtataggtccaagagtccaaaagctgaagaacctggagtccgatattcaagggcaggaagcatccagcatgggagaaagatgaaggccggaagactcagccagtctagtccttccacgttctgtctgctttattctagctattctggcagctgattagagatcgtgcccacccagtttgagggtgggtctgcctctcccagtccactgactcaaatgttaatctcctttggcaacaccctcaaagacacacccagggacaatactttgcattcttcaatccaattaagttgacagtattaaccatcacaagtgcttcatcatgttataataaaacagaattatggcttcaaggacccgcagtctttaaaactacccacacaaaagataaaagggaactaaaattataatttcccaaggattaacagtataagcttcattctaagtgaattaaataatttgtcaatttcctcttcatactgaaagtaaccatactaggatataacatgtgttggaaaagtgattacaaatgactcaaatcagtgccctaaaatttcaaacaaattcccactattgatacataaggaatccacattgggattagcagtattattcacttatgcaaaaatatcttttgacatgaggtgaaaacataacctctgaacacagtcattcttttaggttttcagtgggaattgtgcctaagtgattaggaaaggatatggtccaataaataaactgaaaattttgtaacaagtggtagagtaatacatattaattctgaacagattgacactgtaatttgggataaaaaccataatgattacagaacacagtcagtgtaagtctgatggactagaacagatgtgtccacctgtttagggtccagctctgcttcacttgggctgcataacactagctatttggaaaggcatacaggttaggaaacagaaaatatattggattctggatcaatttttgttcttctatgtaacaattaacgtcaaaaagacagagcacaccaaaggctaaaataaaagaaagtctagaggagatgtaaacattattacatgcctttcattggagataatttggaaaccttcataaagagattttcaaggtcaggagtgtgtaatagattcaaactgtttttgtttttctaacatcaacaaatcttgtataaattaactcaatcggagtttttttaaaatgctaaactgaagaaagatggaaagagactccaatattataatgttcatgcctaggggcactccatatatccaataccaagtaagactaggcttttgtgaatatttatcacttgaaatcatggggaaaatacttttttcttgacagaatatgccccaggtttaaagattatactgtacatcattaaggggtaattttattttttcttaaggtagaaggagatatcagtactataataataaatctgcctctttgttataagaaaagtttaatgtgtggtcataaacattgtttgttttaaagacagattgttatagatgtattattaaaaatatccatcctgtctgtactctttatactttcttacttaaatttattaacaaaattgggtatatgtgtgccattctttctctgttgtctctgccatcctctggatatttagccaatccttaacctaaaaagcctttgtcattataagggtaaaacatcattttgttatatcttaatatagagaaaccagtcttctagctcatttataatcttcaaatgtgtttgttggagatgttttgtattcgttaatttatttgattttttgtataataatttccctccaaataaggttttcaaatttcataatgagaagaacacaggttagtttagagtactgtagatatattcttgtcaaagatatcaactgggtaaaatgctatcggaaacatccaagaagtttaaaaagttttgttggccaggtgtggtggctcatgcctgtaattccagcactttgggaggccgaggtgggcagataatttgaagtcagaagtgtcagaccagcctggccaacatggcgaaaccccttctctactaaaaatacaaacattagctgggtgcagtggcaggtgcctgtaatcccagctacttggtaagctgaggcaggagaattgcttgaacctgggaggcagaggttgcagtgagctgagatcacgccactgcactccggcctgggtgacaagagtgaaactctgtctcaaaataaataaacaaacaaacaaataaaataaatagataaataaataaataaataaataaaattttgtcttccttgcttgccatttcttataatcagaaaaactagagaaacatctttcaacatagtctatatgcagtaccagatttgacagaatttgtattatccaaaaactctagtgggtaaatggcattatagtttataatgagaatattttgtcatactctttgcactcaaggaagtgtaaaaatttaacagatatacaaaaaggaagagaaaactaatataaatagatgagagatctgcaagtgtcccatccatttagagggccaaaacagtgattgatttcagggcaattatgtatttgctataaattcctgttttgaggtcaaaaaattaaaagtgttcagaaaaattgatgtagtttatgcaattctggacatagtacattttatcttatcagtgttattttataatattcagagtagatatattaaaaataataaaatcatgacctaatgactacattactgtgtaattacagatgcaacatattatagtggatgactaaagactttttagattctgtagttgtttaaattcagtagtttcaaattctgactgtgtatcagctgggaaacttttaaacaatactgatgtcttggtgcctagctcccgtatccccaccctcccactcatggattgtcatacaattgacctgaggtggggcccaggcattaattttttttttgaacttttattttaagttcatgggtacatgtacagtttctttacctagttaagcttatgtcatgtgcatccaacaaaggtctaatatccagcatctgtaaggaacttaaacacattttcaagaaaaaacaaacagccccataaaaaagtgggcaaagacttgaacaggcattgattttctttcttttttttttttattatactttaagttctagggtacatgtgcacaacgtgcaggtttgttacataggtatacatgcgccatgttggtttgctgcacccatcaactcgtcatttacattaggtatttctcctaatgctatccctcccctagccccccaccccacgacaggcccccggtgtgtgatgtttgctgccctgtgtccaagtgttctcattcttcagttcccacctatgagtgataacatgcagtgtttggttttctgtccttgtgatagtttgctgagaatgatggttttcagcttcatccatgtccctgtaaaggacatggactcatccttttttatggctgcatagtattccatggtgtatatgtgaaatattttctttatccagtttatcattgatgggcatttgggttggttccaagtctttgctattgtgaatagtgccacaataaatatacgtgtgcatgtgtctttatagtagcaagatttataatcctttgggtatatacccagtaatgggatggctgggtcaaatggtatttctagttctagatccttgaggaatcgccacactgtggttgaactaatttacactcccatcaacagtgtaaaagtgttcctatttctccacatcctctccagcacctgttgtttcctgactttttaatgatcaccattctaactggtgtgagatggtatctcactgtggttttgatttgcatttctctgatggccagtgatgatgagcattttttcatgtgtctgtgggctgcataaatgtcttcttttgagaaatgtctgttcatatcctttgcccactttttgatggggttgtttgccttttttgtaaatttgtttaagttctttgtagattctggatattagccctttgtcagatgggtagactgcaaaaattttctcccattctgtaggtgaacaggcattgattttctaagagctcttttggtcattacattgtgaagccagggttgagaaataattatcttcatttttctgttcctaaattgggttaactggagccatttctccttatatcgatgagatcttatgagaaacagttaataaaatatcttcacatacatttgtgtaacattttatggttgtcaaaaagagtttcaaatctattggaggtacactaggtaattaaagactacaacagaggtaaatacgttttttggaaagatcacttgtctaaatcttggtggtgtcagtgaatacttcctggggaaagagactacaaatctttggcatgaaatgcaaattggggttcaaggttaatctgtgcagaaacgcatgtcagtattccattcctttttatggtcaaataatattccatggtatgaataatccacaagaatttagtcacagaaaaccacatattatatgattccacttatatgaaatatctggaagagacaaatctatagagacagaaagttgattaacagttgcatagaactgggctgtaaggggtatggggagattggtaagtaacagctaatgagtacagagtttcactttgtagtgattacgaagttctaaaagtgatggttgaacttatctgtaaatatactaaaaaccattgaattatgcagtttaaatgggcaaattatacatcctgtgaaatatatctcaataaagttgttctgaaaaacaagtaggcttgcaagaccagatgagtgagagcactgtatctggagggagaaatctcagaaagcaaggagagtttagaaactggtaagtagctccagatggctggcacatagggttagagaagggtcccagaggtggttagaagtgaagctaaataaaacaaatgggtctgatcatgaaagatatgtttagcctttaaatttttaaaagttgtggtaaaatatatacaacatttatcgtcttaaccatttttagtgggtagttcagtagtgttaaatatattcacattatcgtgcaatccaatatctggaactgttttatctcacaatactgaaactctatgtctgttaaataacaattccccatctcctcctgccctagccccagggaagtatggtgactatatatcatcaaataaaaaatgtcaacaaagagacagaaattgttagaaagaaccaagtgaaagttttgaaattgaaaagtgaaataagagtgattagaaaatcactagatgacctcaatagtaggttttagcattaaagaaataattagtgaatttgaggataaatgattagaaatgaggccatgtgagtaggagagagaaaaaacaatgaaaacttgttcacagagacacaatcattctaccataaagacatatgcacacgtatgttcatgacagcactattcaccatagaaaagacagagaatcaacctaaatgcccatcagtggtagattggataaagaaaaggtagtacatatacagcatggtataatatgcagccaaagaaatgaatgagatcatgtcctttgcagcaacatgaaggagctagaggtcattattccaagtgaactaacataggaacagtaaaccaaatgctgcatgttctcacttgtaattgcaagctaaacactgagtacatatggacacaaagaagggaacaacagacagtggggccttcttgagggtggatgctgggagaaaggtgaggatcgaaaaactacctatcaatcaggttactatgctcatcacttgggtaatgatctgtacagcaaacccttgtgatgcacaattgacctgtataacaaacctgcacatgtactcctgaacctaaaatagaagttaaaaaataaagaagaaatttgcaaaaaacccaccagagactcagagaaatgtgggatggaccattaagtccatccatatatgcgtaatgagagtaccaaaagagagagcatgaaagggacagaagaaaacattctatgaaaaaaatggctaaaaacttcctgaatgtgaggaaaactagtaatttacatatccaagaagctaaataactccaagcagaataaatgcaaaaaacaaaatcataactatatacactgcagccaaaatattaaaagtcaaaaagaaagagaatatctttaaagctctaagagaaaaacaactcatcatgtacaggaaaatcacaataagattaatagtaaattcttctgaaaataatagaggccagaggcaatgagatgacaaagtgatgaagttaaaacaaaataaaaacaaacaaccagtaagatgaagcttatatcagaaaacctatttttcaaaaatgaagataaagacatttcaaaaataaaaaagagaaagaaacagagaatttattgctagaagacatgccttacagaaatgcaaatggaaatttatcatactgaaaataaagatgttagacaataatttgagtccacatgtaaaaacataattaacataaaggtaatataaagataattacaaaaggcaacataattgcatatttcctcttcaattgtctcttgattaaaaatattaagagaactaaaacaagtaaatatatcaatatagtaacttgaaaactttccacaaagaaaaacccaggcccagatggcttcaatgtgaatctaccaaacattcagagatcagtatctttcctgtactcttccaaaatatgcaggagggaacatttcttaactcagtctaaatgtcacgtttattctaataccaaaaccaaacacattacagaaaactacagatcaataaaccagctgaatattaggatattaatatataaaataactcctcaacaaaatactgtggatctgaatcctgcaacttataaaaagcgtgcatacaggctgggtgtagtggctaacgcctgtaatcccagcactttaggaagctgaggtgggaggattgtttgagcacagtagtttgagaccagcttggacaacatagtgataccctgtctctacaaaaaaatttaatttctaggtgtggtggcacatttctgtgattccagccactcaggaggtggaaggataacttgagtttggaaagtctcaggctgcggtgatctgtgatctcaccactgtgctccagcctgtgtgacaaagcgagactctgtctcagaaaaaaagaaaaaagttataccacatacaacatgaccaagtgggatttatcttagaaatgcaaggtttgtttaatatctgaaaatcaattagtatcataaaccatattaatagaagaaaggataaacttcatatcatcatctcaatataggcagcaaacattaaaaaatacaataccatttcatgataaaaacacccaacaaactaggaatagaaaactacctcctcaacttggtgtaggccattcacaagaaacccacggataaccttatatttgatagtggaaggctgaatgctttacttctaaggtcaggagcaaggcaaggatatctgctcttgccacttgtgtttaacattgtgctggagatcccagataggataattaggcaagataaagaaacaaagttcatccagatcatgaaggaagaaatagaactatctttaatggcagatttaatggtcttgtatgtttcctcgtatcctaagaaacacatatactcacacatacaactattggaactaatgaatgagttcagtaagggtgcagaacattagatcaatacataaaaatcaattgcttttaatatattaccaataaacattgtaaaaataacattaagaaaataattccatttataatgcatcaaaaataatatttagttatacatttaatagaagtgtaaacttatacactgaaaaccataaaacctaatctcacagaattaaaaaagatctacaaaaatgaaagaacatcttgtgctcatggattggaagagttaatactgttaagatgtcagtactctaaattgaactatagacaatgcagtgtctatcaaaactccagctggcttttttacagaaattaattttcaaatctgtatctgatcagagatttctattcagaagccataaagaatgcctatgaccgaacgataaaaacaattttaaatgagcaaagaatttgaatatgcatttcttcaaaaaagatatacaaatggccaataagcaaaaataataataatgataataaagatgttgagcatcatttatcacttttcagataaataaaaatcaaaactaccacttcacatccactaaaatggctatgatcaagaaaacagataataatcattgtcaaggatgtggagaaattggaccctaatgcattgctggtgaaaatgtaagttggcgtagccattttggaaaacagcttagttaaacagtcagaagattaaacatgaagataccttattaccaagcatttccatttctactaagagaagtaaaaacatatacccacaaaacacttctacacaaatgttcatagtaggtttaatcataataattgaaagatagaagtaactgttcaaatataacatgttgcataacacacagttgaatactatttggcaataaaaaatgaagtaccaatgcatgctacaacatggatgaaccttgacaaccttgagaaatgggaggtgataactaatgggtatgtttttcttttcttttttttttttaaggaggaactaaaatattctaaaatgagattgtgataatagttacacaaccttgtaaatacactaaaaatactgaattagatattttaaattggttaattgtatatgtgaattatatttcaagctgtgaaaaagatatgaactgtttaagtaaacaaaataacaatatattattataatatgtatgtaaatataatggatgaaaataataacaaaagctagaaggagatatattactgtaaagttcttatactattagtcaacaaaggatctaaattgaattataaaaaatactaagataatccaaaagttgtctgaaaaataggaaaaagaatatatgggaaaaaggagaacaaatagtagaggtacctttatttcaaggttgactataaagctttgtcatcaagagtgtatgctgttgacattaatatagagaaatacatcaatggaactgaatagataacttagacatatacaaacatgtacaattgatttttagcaaaagtgaaaaataattctgtggagaaatgatagtcttaaagaacaagtgatttggcaacaactggatataaacattcatgcaatgcactttgattgatgtcttgcggcatacgcaaaagtaagctcaaaatgtattacagacctagaaataagtctgaatgcaacaaaacttgtagaaggaatcacaggagaaaaattttgtgaccttgtataaggtgaaaatttctgagacacaacagccaaaggcacaatcacaaaaggaaaaattaacaaatttggctctatcaaaatgtaaaagcttgtgctatttggaagatactgtgaggagaatgaaaaacaagctacaattcacaatagcaaaggcatggaatcaacccaggtgcccaccaatgggaaactggatacagaaaatgtggtacatatgcaccgtggagtactaagcagccataaaaagaacaaaatcatgttctttgcagcaacatggatgctgctggaaaccattatcctaagtggactaacacagaaacagaactccagataccaaatgttgtcacttacaagtgggagctaaacattgagtagacatggtcatacaaatgggaacaagagacaatagacattgggaaatacaggagagaggacagagggaacaggttaagggttgaaaaaaagtacctattgggtactatgctcattacttgggtgacagactcattcatactctaaacctcagcatcatgcaatatacctatataaacaacctgcacatgtacccctgatactaaaataaagtttgacgaaaggaaagaaaacaaaaaggacaagctatggactgggagaaaatatttgaaaaatatgtgtctaatagagtatataaatatctgtctaatagaatatatataaatagaataagatatgtctaatagaatatataaagatctgtcaaaactcaatacaaaacaactgaataaaatgggcaaaatatatgaccatgcttgtcatcaaagatgatgatatagagatggcaataagcaaaaaaagagatgctcaatatcatttagtcattagagaaatgcaaatcaaaatcaagatgagataccactacataattattgataggctataattacaaagattgatcatatcgaatgttggcaaggatgtggaggaaggggcatttcttacactgctggttgcaaaaaaaaaaatggtacaaccactttggcaatgtcttaagatgttaaacatcttcacaatgtgcttatttcacgttgcatgcctgtatcagaaaaatcttagttacaccataaatatatactcctactatatacccacaaaattttttttaaaaagttaaacatgtacctaacatgtgatgcaggctttttattcctagtcatttgtcattaggatgtgaaagcctatgttcacgaaaaaacatatatgaatattcataaaattttaaaaacagtttatttttaattgctatttttaataggtaaagttgaaaagtccttcaacatatgaactgataaacaaatggtaatatatctatacaatggaatagtactcaataataaagagaaataagccattggtacaaaatgattttgcccagtgaaaaaagtaagaaaaaagccagaaaaaagcaataatcagaatatgctcatctaacagcaatgttacactcaagattttacagatgtatgtgaaatattagttgagagtgactaaacccacgtaatataaatatctattgccatttattttcttaaattgtattaactaatattaaaagttaatttatttctataaaacccctggaagataacttaggaaataccattctggacataggacttgggggcaaagatttcatgatgaaaatgccaaaatcagttgcaacaaaaacaaaaattgaaaaatgggacctaattaaactaaatagcttttgcacagcaaaaaaacaaacaaacaaaaaaactatcaacagagtaagcagacaacctacagattggaagaaaatatttgcaaacgatgcatccaacaaaggtttaatatccggaatcaataacaaacagaaacaaattaacaagcaaaaaacaacccctttaagaaatgggcaaaaaacacgaactgatacttttcaaaagaagacatacatgcagccaacaagcatatgaagaaatgcttaatgtcactaatcattagagaaatgcaaatcaaaaccacagtgagataccatctcacaccagtcagaatggctataataaaaagttaaaaataacagatactggtgaggtttcagagaaaagggaatgcttgtacactgatggtgggaatgtacattagtttagccattgtggaaagcagttaggagatttctcaaataacttagaaccagcagtcccattactgggtacacatacccaaaggaatataaaacattctaccataaagatacatgcatgcatatgttcattgcagcactattcatgatagcaaagatgtggaatcaacctaatttagcccagcaatggtagaccggataaaataaatgtagtaaatgtacactatggaatactacaccaccgtaaaagaagaaaatcatgtccgttgcatcaacatggatggcgctgcaggccattatcctaagcaaactaacacagggacagtaaaccaaatactgcactttctgacttataagttggatctaaatattgtgtacatatggacacaaagaaagtaaaagacactggggagggtgggaaaagggtaaggattgaaaagctacctgtcaggtactatgcttattacctgggtgatgaaactatttgtataccaaacccccgtgacacacaattcacccacatgaatacctgcatatgtacccctgaacctaaactaaaatttaaacaagaaatatgatctgctggatttctactttcacgatgttagcttcatttttaggcataaaactttttgttataaatactttttctggtgtttgaaaataatgtatatgctctgtttatttcccataaatgctacgcatttgttcatctagttaactcaccaaattttctaaaaaagttatttaacattcagaaaaagttaatttagttttttgttctttgcatgtacacaaaaaacatgaacattgaaaatattgaaatattttagagcaaagtttttagaaaatatataaagtatattagatagaacttttgttgtcagtaacagaaatgaatcaaatcaagcaaaacaatttatattcatatttcagaagttataggaccaaaattgaaaggaagaaatggctggggacagaacaaaaatacaaactacaattctcatgaaaaaagtatttacagtaatagaattaccacaattcctgacgattctgtgcacctggatactcacgttgcctggttctttggcaatcttaaagtacggcactgctgcagcggtataaataagtatcccactagccctctggcatgggagacaggatggaattgtgtggagaggaagagaaatatttcagaatagttttgagataaaagaaatgtgaagcaactgtggtgtggaacaaagcactggaaaagatggcataatttcaaagaaatatttttgtggtctgcagatcctcttgcaaagtgtttgagaatttgaaatagaaaattgagttatcctgagtttactctttggtctaaaaactgtgcttcttttgtgtaacataatctcaatgggattcttcccctgtgaatcacaggaaacagaaaatagtcttcatgactcttttcacaattctctgaagaataacacatatcaatttcattctagatgcataggaaaataagttaattcatacataaaatggaggcctttagtgcatttggtaggggcttaatttttcatggaatcccagttaaggaaggcctagagtacatcacaggctttatttaggactatttcacagaaatcaagggcaaaaaatgtacaactagtcttttggaagctgacatttcctggccaaagaatcagattaagttttaatcaggctatttcaaagaattggtgacaaacagcaaaaattggctgctgaacactgagtcctgctaggggattagccaataggatcattatgacccagccaacgtcccagaagggcatagaatagaaagtgtgtgtgtctgtatgtgtacgtgtgtatctgagtatagaggaaggttagctttgtttcttcattttcttgagttatacatgtgctactcgtcctctttgtttttgtcccatgttcatctttgtcccatatggctctggacttacatgacacattattttttccaaggatcccattttcttttatttttctttttaatatatttcagtaggttttgggggaacaagtggtgtttggttatatggataacttatttaagggtgatttctgagattctggtgcacccattagctgagtggtatacactatacccaacatatagtcttttaaccctcacctccctcccacctttccccctgagtctctaaaatccactgtatgactcttatgtaaggcccgcattttcaaactgctcatgtattcttagaagatttgcttttcttagactaagtgcgctggctcgtgcctataatctcagcgctttgggaggtggaggagggaggataccttgaacctaggatttcgagacaagctttgataacatggagaaataccatctctacaaaaaaatagccgagcatggtggcatgaacccgtagtccgagcctgtactcaggagccggaggtgggaggattgcttgaggctaggaagtccaggctgcagggagtcgtgatcatgccactgcactgcagcctgggcaacagagccaaaccctctttcaataaactttgctctttattatgctctgtaaaatgagaagtagtaactttctttataatccaaggaatgattttcgtctatgttatagttctagtcttctactttcagcctatggtcccagttctgtagtcctttttcatcaaataaaagatcatatttattttttgctttttaaaattgatttttgaatagacaatttataaaaacaagatgaagtcaaaaagttacaaaagatatttcatagaatttaacactcagtaattctgccctgatgtaatcagcattattaattttttatgtaacttttccgatattttatttatgtggaagtatatttttatgtatattattctgtatatctgttttctttaacaaacgttagttactataaatactaatatatatatactgcttttttccccacagtacagaacatttaaatcttaacatctgctgtaaaactaacttccttagtaaaatgtaaaatagaaaatgagaagagaatttgattcctttgacactggttatcttctctggttgcctaaatttcactttttggcttaaccagcaaatgaaatatgtatatgtataggtcacattacaaaattttgtattaattaaatgcatagttagataaaataatttattatataactttaaaataaattctgaaaaatgtgtttaagtgaatctttttttgattttaaatttttttcatgtagacaagactttagagtagcgctaaactttattaagagatcagatatatttagtaagagatcagttctcatagtatttattttcacaaaatttgtgtgattaatcagtcaagcttcttgccaaataagagagtcagtagtttttagcataatgatcatttgtaaggtttcttggtttaagctggtgattttgatctctaagagtttcacatttatgccacaaaatgtgagaacataaaactactcatttgctaatttggacataattttacattgcaaaactattcttatcttacaatttagcttttgtaatacataaaagatagcttttatattattttggaaaaagttgtcggattacaaaatatagttattcctattttggcctgttggaatctgacattcatttgtttgtgaggaataacctgggaaatacggctttatagcactggcacttgcgaaatagaaaatgtaattagcttgagatgtagtaaatgactttgttttttccataaagccaacattatgccaaataacaataactcttagaaacatttctaagtcattctattttatttttagttttataatatttacttgtaaattaaattttacttgtcaaatgaaatagttttctaaatgagtagaaaacacctcctgtggttgtttctaatttcattttctgttaacatagctgttggcactagaaatacagaacaattttcagagtactgtcaaccatgtaatttcttggcaaatacatggcaattacttccatgtaattatagtgtcagtctatgggattacacagcttagtctaggaagacagttacctggtcatcttgtccatcattctaccgtatttgtttcctgtgtcaatgtcctggtcacaccatgaattatggctccccttaatactgcagtctggtcaaagctatagaattcagctaaaggcaactcattttcttatgttcctagattattcctttggattaagactaaggcaccgttgtgggttaacttttgttacttattaatgctccaggggcatgtagtaatgaatgttgtggagtatctttaaagaatcaatagaaatattaaaccaattaattaacataaatacaatataaagaaagacaaaccattaaaaagtgtgataattttaactttagaaacaagttacacttagctttattgtgttattttacaaattgaaggtttgtggcaaccctgcatcaagcaagtctatcagcaccacttttccaacagcatgtgctcattttgtgtctctgtgacatattttggtaattcttggaatatttcaaatgtgtcattaatattatatctgttatggtggtccataatcagtgatctttgatgttactattataactgttttgagcaccataaaccatgtccatatgagatgtcgaattttatcagtaaatgttgagtgtgatctgactgctcgaacaactggccattccctcatctctctgcctctccttgggcctccttattccctgcaaatgaccaaattaataattctgcaatgacctctaagtgttcaaataaaaggaagggtcacaaatctctcactttaaatcaaaagctagaaatgattaaggttagtgaggaaagcatgtcgaaagctgaggtaggttgaaagctaggcatctcgcaccagtcagttaactaaatagtggatgcaaacgaaaagttcttgaagaaaataaaaattacaattctagtgaacacatgagtgaaaagaaatcaaagcaactgtgttgctcctgtggagaaagttttcgtggtgtggatagaagatcaatccagccacaacattctcctagaccaaagcctaatccagaacaaggccctaactctcttgaattctatgaaagcagagagagggaaggaagatgcaaaggaaaagttggaagccagaagaattcggttcttaagatttaaggaaagaagccatctctatagcataaatgtgcaaggtgaagcagcaagtgctgatgtggaagctgcagcaagttctccagaagagctagctaagataactaatacatgttacattaactaatatattttcattgtagacaaaacagccttccatgggaaaaggatgccatctagtactttcatagctgaagaggagaagtcactgcctacattcaggcttcaaaggacaggctgactcttgctaggggcagctggtgaatttaagttgaagccaatgctcatttacatcctgaaaaatcttgagcccttaagaattatgcaaaatctactctgcttttgctctataaatggaacaacaaagacaaatgacagtatatccatgaccagcatggtttactgattattttaagcccactgttgagacctgctgctcagaaaaatatttcaaaatattactactcattgacaatgcacctactcacccaagagctctgatggagatgtacagagaggttactcttgtttacatagctggtaacacaacattcattctgcagcccattgatcagcaataaattttgactttcaagtcttattctttaagaaatgcatttcataaagctatagttgccatagatagtgattcctctgatgaatctgggcaaagtaaattaattgaaaaccttctggaaagtatttgccccactctagatgccattcagaacatttgtgattcatgggaggaggtcaatattgttgcaatgacaatgaaaaatttagcacattacataaacttatatgataaagcaggattgactcaaattttgaaagaagttatgtgggtaaaatgctatctaatagtgtctcatgttacagaaaaatctttcatgaaagtgagagtcaatttgatatgggaggggagcagggaagtgctgggtagagaagggcatggtctctgaccagggctccacccctgggtctgtgcccatggacctaggtgaggatgggcatttctgttttcatgcccaaatgttgcattttccaagaccaccctgtccccccacccctgccatcctgtgcctataaaaacccaagacccagcaggcacagacacaactgtctggatgtcaagagaaatgcatgggcagaagagcatacaggcagctggacatggagaggagcggaagaacacacctgcaggcaccagcagatgccagcaggccatcgaccagaggaacaaggcagaggcttaggggaaattggttgggatggttggaggatagttcagtggaaagttcagttggaggatagttcagaggatagttcaggactgagtggccccactccaggggaaaaccaccatcccactctatcccccttctggttccccatccacctgctgagagctatttccactcaataaaaccttgcactcattctccaagcccacgtgttatttgatttttccggtaccctaaggcaagaacccaggatgcagaaagtcctctgtccttgcgatagagcagaaagtctaattaagctgattaacacaagccacttgcagagggcaaaactgaaagagcacgttgtaacacatgcccactggggctcaatcccagttgctgccatggggtcggtgttccctgcgatgtgcctgcctgtctgcaagctcccccaggggtatgagcagccaggcacccaagaagccagccacacccccatcgcacatcctgtgatggggataagggaacttttctcatttcaaattgagaagaaaaacttcattcttgtcttattttaccaaattgctacagccacctcaaacttcagcaatcaattccctgagtagtcagcagccatcaacattgagaaaaaaccctttaccagcaaaagactacaacttgttaaagactcaagtaattattagcaatttttagccatgatatatttttaattaagatacgtactttttaaaagacataatgttattgcacacttaattgactacagtataatgtaaacataacttggttatggaaactggaaaaccacaaaattcatatgattcactttactgcaatatttgctttactgtggttgtctggtaccaaactgcaatagctccaaggtgtatgcctttttttttcaatgctcatcacccaacttttctaaatgaactataaaaggaaatacacagttattcatactgacacactagaatggattttatattgaagagtgaagaagcagaaaaacatgttcatattttcagtttaagagaaaattattttttggcttagttttcgataaagtaaatgttgaaatcccttaatggaaaagcattttttgttaaaaattttacaaatttaaatagaattttatttaactttcagattacttttcttataaatatagaaattacaatgatattaaaaggttcttatttcctaagagtgggagcttgatcggtatgatccactttttgtaggcatttagatttacctaaataatttcgatattatagaaaatgctttaattatgatgatgaaagtagtatgaaggttcaatggatttactgtatttgtatatattggcaaaatttccataagtataaagaaatatgaaggacaacagggatgttttaactaatataagaatattgttagttaacatttattgaattatctgataaattatgaaaaccttcagttaattttgcctgagtgcacaaaatctgaaggaaaatgttttcaatatttttaaataattattgcttaaaatgtgtcttactctgtttatttttaaaatgctatttgtttacaccaccaaattattaactctcagaaatttcttttcagggcttaagaaatatcaaaatataggaaattattttacaaagatgtttgtacattaactacatttttggtaatttataaatataaataaatgtattcatttcttcaaaagtatttttgagtatctacctgattccagacatagtacaagtactgcagagaaggcagagttacaaatatgaagatgttttttcttgttcttgttttcttctcagaaatggcagaagacagttgctaaatgttattcagcacaccactgtaaaatggtactgactttgcaatcagatatacctgaaagccttgtcttatactgtataaatttgtttcctcatctgaaaggagcaaattatgtcattactaatatcatgggtttgttgtaaggattaaatgaagtaatcatcataaaatgtttagcatgtcttggttcatatcaaactcattacattcttatttcagttacagatttcatcctcaaaacatcccaatcacgttaattattaacagcagatgctatactaagacagactgaatcagtaagtactattgatgtatcttacaagactcatgtggaaagtattgaggcagtgtagaaaagggagtgttcaatgctgtcaagaaagactcacagaaaaggtaatgaatgggtgggattatgacagatgtaccagagtctactaaacaaagaaagtggatggcttgcagaaaatcctaggcaatcagaatattgtgtgaatggcacagatgtgttgtagaaagatatttgataaaatggacaatgtcttcagaggcatctatgtgtggtttgattccaggcaaagtctgagcaacacgaacatctttctacaatgactgctgacagtaaatatcatctgctacataattttgcctgaaacatgatatatttttgttttctctctgcctcataattcctagaattaaggaagtgaaagctttcccactgaatattgaccaccaggctcaaatatacaattacaaattaaagcattaaacaaagtaggtcttccaagtgatttataaatattaactaagtcactgatttaagtgtcaggttaggtagttagacattcatattaacttttataactgagaactttgaaaaaaagagtagtgtgtcttcatttaaattcagaaaagcccatacatttgaaatttgtattccatgaatacaacctattcttaaattgagtatttcattgaatggagctgaaggaataatattatctaaatagtatacacatcaaatttttgcctagatttattatttgtttttaatgtttaaaaattggcgggttacagtgttatttttatgctggtcattgtaaaattattatacacacttccatcattgtttagaacctcctggtacattatattgtgttgtttcagtctcttctgtatgtttaacaaaaaatattgacaaccaagggatgttttatatttttaataagagagagtagaaaataaatactaacaaacaatcaaccacatgtttattaatgcttggggtcttgctaagttgtccttgagacaatctccttcctttggactatgatttcccacggagacatcactttgtaatgagaaagtaattctttagttaccagactgcctcctaaggtatgtaaggattataggccatagatttgaaacaatttgattatttaatatatccatttgcatttattactcatgtatgggtcaaaatgtatgtgggtgtagggtttcatgctacatgttagaaaaggattagtagtttatgtttactgtggagctccagtccctgaatatctggccatgattggtgtgctaaacccctgctcactctgaacatgactaggctctcctctgccttctattccttctatcctgactgctttcagtaaaagcaaagtatgtactcaatagacccattgataagaatagttcaattatttttccaagacatcagaccaacagggcatgtctttaacacatagcctacctactttgatatgcagtaaaaagtggcgtctctcttcttgtttctcctggttggctttcacctcttcattccccctttatgctttagcaaactacttaaaggtatgaaacttgtaacttctctatttggaagtttttttgtgtgtgtttttttttcctggaaggatttttttttaacaaatatatgtctctaaatgaagtgtcacagtgacacttatgtagaggaaaaaaaatctgacccagctcaaattatggaatcagaattaatctctcattaaggtattattcaaatttcttggcttggatcagattcacatgacctatgaattcagactgtgcaagcaaggggacttgaattgatgtagacaagagaaccaataaggaaattagaaatttatagccaaaagaaaaaaataaagccactttaatttcacttcatgaagtctttccaaagtgaaattaaggatattccaaaactgagcaaagacaataaaagtaatttgtcaaaatcaaacacatttagagttacaaagaaagcatttctagttgtgacccttaggacctgtcattactaaaagaggctgtaaaaaaggtttgggagaaaggtattaagggaatagaggctgataaggtagaaatcttcatagctaatataaaagtaaatcttcctaaaccagaaccaaatgtaaaaaggaaagatttactgctggctctgtctctgctgctgtaatggccatatcattagctatatgttgtgaaagcagccacttggtaagatgggaggcattatttttaaattgatcctagaattctcagtactgtcttttttttggttctacattcttgtgaaaattttcctgacaagagcagacagctgtagacctagttttgtgacttcttctttgatactgtatagtgtggtgggctttattttcacatatgtgcatgtttgaaagccagttgtattagttattgtgtgttctgtggcacattgcttacactaaaaatttcagtttcacaactgggaaaacaatatggatgatgatgatgacaataacaaatacttacattattgtgagaatcaaaatgttattacagcttcctaaaatttttattaaaggacttggcacacagttcaattttagcttaaaataagaagaatcagaatatgggctctcagcaactcttctagtctcatattgtgaagaaattatcttcacttaacgtaccttttaaacttatattttaagttcaggggtacaaatgcaaatattttaagcatagtttgtgagataatagacatactaaagtgaaaaggatcatagtaaaaatgattttagctcttcatggcatttaaaaatcatcccaaaacacccaaaaaattgagtcttcaatagaaaattactcactgattaagcataaagaaacagaaacttaaacagaaacagaaatgtcattttgatgaaggaaagggatgttcaaggaaggagggaagcaagttggaaacaaaggaacgacaagaacaaaattgaaaacagtattcgaaacaactaatgattccagcagcgtgaatcaggttccaggtgaaaggagcaggatgtaaagtaccaaattcttgaccatgccctttagaggcattattttatttaatttgcaggttacccaatgagagtaagattatgttttaattttgctaataagaaaaaaccttgagatgttctaatatcgaagtcctaaagaagagatgagatggacttattaattttctgagttttttttttcttttacgggaataatttaggtcaacatcagataggggtcacgaccttggttgaaatgaaaaaagtcaaagaataacagatgctgttgaggttgcagagaaaagggaatgtttatacactgttagtgggaaggtaaattagttcagtcactggaaagcagtttagagatttctcaaagaccttgaaacagaattaccattcaaatctaattattgggtatatacccaaaggaaaataaattgttctacccaaaagatacatgcactcaaatgttcgccacagcactattcacaatagcaaagacatagaatcaacttagatgcccatcgatggtggattgtataaagaaaatggtacatacacaccatggaacactacccagcaatataaagtatgaaagtatgtcctttgcagcaatatggatgcagttgtaggccattatcctaggcaaattaacgcaagaacagaaaaccagataccacgttttctcacttataagtgagagctaaaaattgagtacacatgcatataaacatgggaacaataaacactgtggactagtagagctgggagggaaggagggtagtgagggttgaaaaattccctattgggtactatgctcagtacttgggtgatgggctcattcataccctaaacatcagcatcacacaatatacccatgtaagaaatctgcatatgcactgacaaaacctaaaagctgaaataaaaaaaagacattgaagtaacagaagaagccgagatagaaatcactttctctttcctacagatcccaagggaatctggggattcccttttctctggtactcaggtgtgactccaaggaactggctggcagaatagactgtaagacaatacaatattgaacaatactgttttccaaaatctttccaaaccctcaaaattatcaagcttggtgtgtttgtgtgtgtgtgtgtgtgtgttaaagagagagagaggagggaagatgcagggagatgaggggagtattcccttttatgtaaatcacctttgttcttattattcatatactctatagagtcatatacaatatatcattcttgattttcttactttgatgcttgttcttccagttattttccattatagacttgggcagatttatgctgcagtgaattgttaggttatagcagtgcaaggtgtctagggttgagaaaatggatttttttgtactgtgaaacagcttccaagcagtgagctaaacaagtttggtgatgcaaaaaatatgattatcaatttatcccataataatgattcatctcatgacaattcacattacagagaatgcaaaatgttatgaatgcctccttggcagaggtgatatgcctcctatcattgcatatattagaaaagcatcatcttaaatgaccagctccaggctttccaaaattcgtataaaaatgtatttcaaatggtaaactcaagatacctagtagttattactcttatttaataggaagttttcttcttagtaaccatcttaatagtcagtctataaccttcctgcatctttaaatgttctacttgtgttaaaaaaacatcttttttattagaggcccagcttctttttgtggaagtcagaaaaaaagtcttagtttcctctatagctagagcacagttatatgacctaggttccactaattggaaaatacttaatacagaaggtgatgactcaaataggcagtgtcttagtctgttttgtgttgctgtaacagaatacctgaaacttagtagtttgtgaacaatagaagtttatttgactcacagttctggaggctaggaagttcaagagcctgatgctgggaccttctttctgcttcattccatggtgagaggtggaagggcaacagagcacaagagcaagagggagcaagaaagggcttatctcacttttataacaaatccactcttgagataatgtacccatgtccatgataacaacattaatcgattcatgggggcagagccctcattaccgcatcacctcttaaagggaggacctacctctcaccactgttgcattagtcattaagttcccaacacatgaactatggggaacacattcaaaccataggaggcaacttctgcacagagtccatgatgggaagaatgccagcagaaacatccaacttccaggggtaacagtggtggattcaaaggaagggtccagtactttgtatgtgtggagtccagctgtgagtaacagaaactatacttaaaggtggcagttatgctaatcattggtattttaaaattcattgaatttttaattaaatatagagactttgataaaaaatgaataattcatgtataggtgatacattacaataattatgcaactatcaggaaaccctcattctctgacaatgccaaattatagttctttgagcccaagagccctcagtattccacagaattctacagcaaactattcttccaacctgtgatcatttgccttgagatatttacctttcatttttattaatagactatttttataatgagtttgtaacacagaaaaattgagtggatagtaaagagctcccacattaactacccccagccacatactgttttccaatgatcaacatcttacatgaatatgattagtatggtacatatgttataatcataaaccaatattgatacgtcattaactaaaatctacaactgactctgatttttagttttaatgttctttttctgttccctcgttccatccaggattccatactacatttatttatcgtgcctccttgggctcttattgactgagagtttctcagatattcctgttttcttgtttttaatgaacttcctttacaattataaagagtactggtcatgtgtattgcaggatgtcgttctactaaaatttttttttataactagattggggttatgggttttcaggaggaaaatcccagagataaagcgccatcttcatcagattgtatgaaatacaatcatactaccaacttgatttctgattgttgatgtcggccttggtcacccagttgaagtacaggttgttagccttcttaactgtaaagttactcctgtattctactctttggaagaaagtaacttcatgcagtgtaatttttaagaagcaggaaattatgctccccgctgtccgtagggtggaatctctataaaatttatttggaattcctctgcatgggagatttgtctcttctccatttattagtttattcaatcatttatttacatcaatatagactcgatatttattttgtatttcagattttaatccaatactacttacattattttgttgctgaaatcattccagtttaggctgttgggagttcctggttggctcctgtgcccttttgacatactctcactaacatgcgtgtgaatttttttatgcctacttaactgctggcactgcaagatgtttcatgtctagctttaaaaaattaaattaaaatataaataacatacaaaaaagctgtacatatttaatgtatacatattgcctattaacactttttaagtatactatcactattgtcaactgtatgcacatgctgtacagtagctctctaggacttactcattttgcatacctgaaactatgtattctgaacaaaatctctctgattccctctcttcccacttactggtaaccaccattctaccgtctgcgtctatgaaattgactatgttaaatttctaatacaacttggatcatttaccatttgctctgctttttctgtcttgtttcacctagcataatgtctcccaagtgcctctttgttgtaacaaatgaaaggattttcttcctttttaagtcttaatactattccattttaagtacacatgacattttatttattcgttcatctgtcaatgaatatattagatgttttcatgtttttctttttataaataatgctctagtgaacacagaaatgcagaaaatctttttatgatactgatttcaattatttttggtatatacccagaagtaggattgctggtatcatatgatggttctattttaaattttttaggaacctctgtacaattttctataatggctatatttatttacatttccaccagtggtacacaagagtttccttttctccacatcctcaacagcacatgctatttttagtaattttgtttgttttttttttgtttgtttgtttttttcttttgagatgcagttttgctcttgttgctcaggctggagtgcaatggcattatcttggctccctgcaacctctgcctcctggattcaagctattctcctgcctcagcctcctgagtagctgggattacaggcatgtgccatcacacccagctaattttgtatttttagtagagacgggatttctccatgttggtcaggctggtcttgaactcctgacctcaggtgatccgctcgcttcggcctcccaaagtgctgggattacaggcatgagccactgcgcccagctgccatccttacaggtgtgaggtgatatgtcattgtggttttgatgtgcattttgttgatgatttgtgatgttgagcacattttcctgtatctgttgaacattagtacatcttctttggagaaatgtttattcaggtcttttggctattttaaaataaggttacttgtttctattgctattgaattattggagttccttatatattttgcatgttaatcctttatcaaatatattatttgtataggcttatgttgttataatatctgtccagtgttagaatcagttatttctccaaaccctcctgaatgtttttaattgaagaatggtactaaacccatgatctggatgctaggtttgctttttgctactcagatgtttcttttagggcctctccggtaacagagcaaataaatatatgtgtgtgtagtaacccatgtatatagacacacctgtaactatttctttatgtaaccatctatctatattaagttaaacatgagttcttgttcatattcttcttcaattttaatccattaccacacaagtcattctagttttctcccccttgcttacttgtaaattccaagagtgagaagtttggctcctaccatctgccatgcatttacttaattattcaattctagcatagacctatagcaatatcagaattattaaatgatacccacagactgcattcatacaccaagttaattaggtcagccctttttcctcactgtcttcagtgagttttttatacacttgtaatacagttagattctcgtaacttggtccttcttttgaggccctgactttctaaattatttatttttcactttgcatacattaaggttcactctttgtgttgtaaaattctataggttttgaccaaaaataatgtcatatatctacttttatggtatcttacataaatgtttcactgccctaaaatgccccatatttcacctcttcatccctcccctcttccctaaactcccaaaaccacttctctttttactgtctctataattttgccttttccagagtgtcatataattggaatcataaagtatgtatcctttccacactggctttttttcacttagcaatatgcatttaagatttctccatgtatatttgtaccttgatagttcatttatttatttcactaaatagtatttgattatacattcccctattgaagaatgtctcagttgtttccagtgttggcaattataaataaaattgctataactattcttgtgtagatttttttttgtggacagaaatttcaagtcaggaaaataactaggagtgtgattgatggatcatataagactatatctagctttgtaagcaactgccaaaccatatcttaaagcgactgtaccattttgcaccgtctcccaaaatgaatcataaatcgtgctgctttgcatgctttccagcatttagaattgtcagattgttaaattttagccattttaatctgcagtttcttttaagaacttctttactgcttgcctttggttgtgaaactataattatcacagttgatttcattttatctagatacaaatcaattcttaacctgatttaatttttgtctccaatcatttaggcatagtttctctattcttgcgttccttatattgaatctttattgtttgaccagatttcagtaagtggttttggttattatttgattgtttatttttgttttgttttatgaagggacatattcctgcagttcttgtgtgtttaaagttatctttccgctggttttataactgcaacattacttggctgcacattacatttgtgggttgtatcctcatcatcagaacttgtagacattgatacctatcttttagtattaaagctgtctctggaaaagtcataggacaataaaatttttctctccctgtcctctttataagtaagtttatgttattacttggatgcttatatgtttctggaacatcacataacatcacataagttagagcttggtattaattaattattttgtgctaatttttccaataacatggtatttttttctattggtagacttaggttttgtttcaggaaagttttcttctcttttgtttagcaatatgttttcttttatttattgtgtcttttcagtaataccaacttattcagaaatgttttctatatctatcttttctaaaaatcatttgggcaattttatttttttttcatttggtttttattttacttattttggattatctactgcctctttattcagtttttgtttgtatttattttattctaatggatctctacttattttatttatttctttatcctcaggtcctaaagctatgcctactcggtgggcattagatacatattattaagtgaagttgattaaaaatatattcaagaagagataatcattcacaaaggaccatttagggcatttcagtaggcaaatgactaaagcatagcttctttttttccaggttgggaggcagaccatgaatgctgtggcctctgcactcaaaggtaaagtacaacttaaaaagaaaataaagatgatgtattcaaacattatttcttttttgtttgatattattagtttttaacaacatatgtaataaacatattcaaaatatctgaatgtgataaagtcatataaactttttctaaagatgtatttatttacttttaattaattaattaatttatattttaaataataggattggagcctcactactcctaggctcaagtgatccttctgcctcaaactcccagagtgctgagattacaggcataaatgatgcacttggcctatttacttattttttaatgaaattttatattttaatttgctttataacttggtcttaccacatcctccatccacactccaattctagaaacctatgtgacacaggattcttttggtgttacttcaccagccagaaatctctgcagctggtggcacctctgcccaggttttgttcaggccctctgggctctctttgcccactccgcctgggagactgtgtttgactcgctccaccagcccacattctgcaccctccatagctctgtgctcagcccacagctgttccaggcgtgccacagatggcttccaccttgggcaccagtgtctggatgagggggtgcgtagcaatgcccaaaaatttagagacgccaccaactgcagagcccaagggctgtcacagcctttgctagaagagtcctgaggcctgagctcccagcaagtgttacagatcttgtttgttcccgcagcttccatgaacagggttgtgtcacagattgtttggtcctgctacccacaggtcagtgaatgagggcttgtggtgcccactggtttttttttctcccccactgcttggtgagcaggagggagggttacagtgttaaagctcttttcacacccgctgttccctcaggtctgggttcttgtcccacaaccaagaagaatgaagtactcagacactggagtatgaggaaggcagagaaaaatgttattgagcaacagaaaagctctcaacaatgagaaaggacctgggagggtagccctctgtgtgacagggagcctgaaagcaggtagttgcctctgtgaccgagtctgaagtttttgtgagctcagaatgggggactgcatgctgattagtccaagggtgggcctagtaaaagcaccatttgattggctaacagccatcaaggaagttttcactctggtcgtgaactctatccagaactggcagctcagttttcaggctccaggctgtctttggcttgaaagtcgggttttaccgtcacctgtccctgtctgcctaggaatttgtctgtctcctgtcactatcacatgttaaaaacatgttacatgtttttaattattttctgctatgcatttacatatatgtagcgatttgtgtcagttatttacaaaagtatgatatgttagttactgcatcatgttttctttctcaacagtatatcacagaaagttctctaaataatttagctataaatcattccttcaatggctgcataatagcccattttgtggaagcaaagtaatttgttctgtactccaaattgcttagtattcactttacagcagctgtttctcccagtatgaaaaagctgcattattgtatatatttcccctactgatagtgatttattagtatggaatagattctcaagaatgagcttacttggtcaaaggatctttggattttttttattttaataggtgtttttagattacttttgatagtgcaataaaaatttatgttttcttcagtaatgtatgagggaatactctccccacattccaacaacaatagatactatcacactttaacattttagtcaggctgacgtgtgcaaatgtttcttatagttacttaatttgtgtttccctgattaatgggatgctaaagcatcttgtttttccctatgtttttggccacttgagtgtacacttctgttttgcctcattgtgtagtttgcccatttatttgttgtgaattttcttgtttgtttttggctccttcttggtcaatttgattgacgagaaaattatattacattatagatataaactttaatgtttttatatatatatatatatatatatatatatatatatatatatatatgtatagtagatctcatcattttcaataagttttatttcccaaacaattgcttagtttttactttatcttcctgtccaaattatatatattaaaaataactgtttaaaaataatttctgcattgttttcttggttagcaatataacccccatttttatattatagacacttaaatgcaaagacacttgattaaataatttttttcatttttatatttatattattatttaatgatataatgtagtcttgggaatggaatagatttaaatcaaacaaccacaaaaacagaatgcaaaactgcaatcaggataaaatctattctattgatttatgatgaatgaataggagttgactaagcaaagaggagagataatacttccaacaaaaagaagacatatatgtaaatgtcctattgtggaagcaaattttcatgcagagaaatgggtaaggaccaaaatatacaagtccttgtaaatggaacctcctcttaatcttaaaaataatgagaagccaataaaagtaagttgtgttgttggtgttttggtgttggtggtttgcatgttggtgtctgtgtgagagagttttgtttttttgtttttggtttttttttttttttttttttttttgcatttcaagtggctcactcactccagtgtggggaatggattgggtgagcagaatgaacgtagatagacagtacgtagttgcttatgagagatgatggtagcttggcctagagtggtgttgacagaaaagctaaaaagtgtgattttgtgagatatgaggaagtaaatgcattgttgctgatgcactgaatatgggaggtagggcagaggaagtggcaaggatagttgtatgatccagtgattattgggtctttatgtcagtctatttggattttcttacaagaaatttaacactgcttacttacagaacagtttttatcagtgattagcaactttggtgttaatttagagaaagtggacagtagaatcattcagggtgagttttgtcagatgggaatgacgaagagacagagggactgagacaggagagactattggcaaaagcttttttaaaataatagaacatgaaatctgagctggtgaaggagagaagtaaaaggggggggctgaagcactgtagtcacattttgtgattttgattgactcaggggacatactatacaattttacattttgttcccaattcctattatcaagtttgttcactcttgggtgatcaataggactttttttctaaatacctgcctgtttttttttttttcagttttgatctctgatgttgtatagattcttaataatactactagagattttcagtcccttcttccagagattctgatttagttgatctgagaagattataattactagaatgtttctctagcaagcaatttttaaacacatcattcttttcatggttctgtggtgatttaaatcctcttatctctagattagaatgatgactttaagagagcataaaatcctagatacatagagatagagagtaggaggaggtggtatactgtttcctttaagaaaggtgcccttcctccattgaaaggttggtgagtatactttaagatgctctgcgtacttctatgaaaaaaaaacttgctccagactactagaggggaagggtagtagaagcagtcttaaaaaatctcaagctatatacaagggtcattttggctctgagaaaaacataaaagtggtctttttcatgtctttatggatagagattctggatgctaacctgtctatcttccttatgactttgccatgatagatgtttactttttaggagaattatctacttacttcctttctgcatcagtttatgtccaacatttaatatcccccttttcacatttcctcctttagcaaattgatttagtcaacagtggcataaagctaattattgcatctcatggttttaacgtttaagatctaactatataatgaatttaatcacggagtctcaagaaaattgggcaaaccaaggctgaattacttaaagagagatagagcctgggtagctacctgaaaggccgttcgggggagactgcagccattagtaggttaatgatttaggattagaatttgtaggtatttacttctctcacttcagcctttatatccacaattgtagagagatattgagatgaaatgaccacttttcccggaaaactaagttgagcgaagagatttgtattgaaactgcacctaaaaagtcaatgtatcaagctctccttttatgctgttgtaacagcataaaagcatggaaagaagctttgaaatcaataaaataggtttttgtacctgttaaccatcccaccttccacctcccccatgcccactacctttcccagcttttggtaagcatcattctactctatatttccatgagttcagttattctattttttagctcccacaaatgagtgagaacatgcacaatttttaacataatatcctctagttctagccatgttttgcaaatgacaggatctcattattttaatgtttttttgtatttttataatgtataaaactttaattgtaaatacaattatttaaaggaaggttttaaaaaatgataatttcattcctgctgtgccacttctagcgccagcagttaaaataattatttcatttttgaagaataaatggaaataaacttgttgtggtaaatgaacacctgtggttaatatgaccactttggctatgaacactctagatgaaagcttaatttctttaggtagtatgtgctataaagttatcagtttgctaacatacaataaaacacctaagcattggggtaggcaagatcaagaagatttagttacttccacagtttcgcttcagttaaaaactgaacaattttcaaaaaaccccaaagttgggggaagatgggagttgtaagacctcttttacatgaaaaagtttaggatcattatttattatatgattatgtcagaataattttggaaatggaatgccatcatagcaatgttggtgttagaaagcattgcataaagaaactgacatacatagacttcaagaccagaggctaatagggcttctgaatctcttctaatatgtatcttatcacaattccttcctaaaacttgctcattaatcaggctgaggaggtggaagctacactgttaaaagcttgctcattcttgcaaaaattaactctcttttagcttcagaagtttctaaagaccaatttaatgtgcatgagtaaaacattattactttcgtttggtaacttggaactttaatcagtgccagatataaagcattattttatacacctaggtttgcatgcagggaagattagagaaaaatctactgattaattaggaagtcttgttttacttctttgtttaattttctcctaatttctggtctcatcaacaaagtttttgttctgtgaatgttacatgctgcagtgtcatcaataaaacgaatacaccatttcagcatgtcactccaaaaatgtcaatattttctctcaaagaaaaaaaaatgtgcacactgatgacaataattaggaagacaaagtagaaaatgggtggttgagaaaaaaatgttattaagccccaagcctgatttaagtgtgtgggtagcattttactctcagctcattacaaaaccctgctggagaatagcaaaaaacacgtttaaagtagatagttagaagtatcaggtcattaggatttatgtcagcaccgctctgaaaggaaggcatatatttttccttctgagtctgaagtgttgttttggcccattgtcagctggaaaacagatgtcttataggtgaggtgtttgttgcactatatcacctagtggaaggtggtgcttcattctacctaggagaatagggaatcgtgtttcagatttaaccaactaggatgtctttctagagtagtatacaatttattgtgtaagttgtttatttaggacatagagtccactgagtgcaatgtcaagtaacttaaattggtttgcattagtagtacataatcctaaatatgtaacaatagatgatttgtgcatttaggcaatcataagtgagacttaacaattactgattgtcataaatgccaactaaaaatttactaattttgaaaatttcatattttcataatattttgtgttttaggcactattttcatgtatgttgcccctacagtattaacagacagggattactctgtcactagaatctttgaggttttttggtttttttttttttgaagttagtttagatatttgcatagtgaaaaacattaaacccagtacaggagttctaacagatggccatataacctctgtttaaaaatattctgtgacagtgtgttcattatattaccatccattttagcttaacactgcatgctgttttcttctttttatgaaagaaaaatatagaacttttgcaatatctaatctattttgtagcctaggaaaacagacagtcaggaatttctggtaatgagcatcacaattaagatgaagtaagacaaatatcagtgcactttatttctcatcattgactggaatctttctgcagattttaaatttgggtgatgaataaatcagatggaatctagtagcagtacttggcaaagaagttatgaactgatagaagacagacacaaatttttaatgtgataacaaaatcctaaatttattccttttttttgtgatgcttaagtcctaagaccagtgacagtgaggattgtataacaaataagagataattctgcaactagtaaatttcaacattcttaactatgctctgtttcttactttttaaaaattctgtgatataagtttatttcaaattctttgaagtaaaaggaaatattgattaattttgctagtatcactcacacaggaagtttagaaggccatgttttaattaaagcagaaaacaaaaattcatggctcatgtatttggttaaattatgattatattttatttcctagtgaactgtaacccatagtacttcgccagaatctaaatcaaacttgaataccccaaagagctttctaaagcaatgttctcatccattgacaattgaaaaataaaagtgttagctgaaaaggggacttaaaaatatgctgtaacaacattcttctgtcctgaatctacagattacctgagaaatagtctttgctagtttccaaatatagttatggattaaatttggagaactaattttagatgatttctatataagagaatgaccatctaagactggttgcctcttgtaataaatttaaattctacaaacaatcaaggtttgtctaattaaaatatatatttattggctttagtaaccagccccaaatccagtatgtgcctttttagtagcggtgagtgaggttagtaataaaagcttgccacaaagtttttactgtataaatggaaataaatcaacatgcagaaaaaaatgtcataatgattttacagacttgggcatgatatgacaaagaatatttttataacgttgacttattgacaagtcagagagcttaggaatttctgtaataaataaatagatatttcatatagaatggagattactagcttgagagccaatgagtatttaatgctgcaattgcatttacatttctcaaatgctgaactaacactctaatttccactttaaaaagaaataaattacaaaagaaaaaactttgctctgaaatcagcgtgctggtttctttgactataaatgctttatttatttgtcattagttttaaagatagaaaacagtgcacaatttcatgactttctagagtgcattatgataaatttaatattagtgataaaggtttcctgtctaagggtaagaaagaaaattttaaagatgctaaataaatatcgatgccttatagaaattttggatgttctgttatgataataaaataaagaatattgtaggggtcaggagcggtggctcacgaccataattccaatgctttgggaggccttggaaggtaaatcacttgagcttaggagttcgagaccagcctgagcagtatggcaaaaccccacctttacaaaaaatacaaaaattagctgggtctggtggaaagtgcctgtatgtagtctcagctacttgggaggctaaagtgggaagattgcttgagcccaaggaggttgagcctgcacggtgagctgtgatcctgctactgcactccagcctgggtgacagagtgagaccctatttcagaaaccaaaacaaaatagtagatgtaagattaagtcagaaagttagattcattctcttttatctagaaattaaagacattatggaagactcaaaactacattgcattttgattaatgattaatccaaatagaagaaataattgtcctacttgttaggtactcataccttaaacattttggaaaggcaattaatgattcttggaatacttctactggtcaaaaaaatccactaacaaatattcattgtttatttgacaatgtattaagaagaaaacagacaggtcattgtacactatcagaaaaattgattatccttctgtagctttgcccctcagttgtcttttataatatatatcaccttggctgatagcacaccatcttgagtactctccttctaaagctgtattcattttatcatttgcttccaacgaaccttcttgatatatagatttctgctgtaaaaatcgatcttataatacatgtttgccatacataagttttaaattgctttgaaactattgattggcagtctttaagagcttactgacttcagcagaaacatcacagatttattaaaaagcccaaatattctttcatatcctgtaccagaaaaagagtttgtattatttttattttcactttaaaacagagattagtgttcattcagataccctcaggcccatttatatttcctctgccacaaaacataaatctaatatattatgctgtttcttttttctggtatgtgtacttctcttgaatatggtatcaatctgtaatgtacatacaaattcaattatcctgaacacatggacctgattatatagtcatcacagttacatacagttttggttttcacacaagatttcacatttgcagatattaaatttataattaaatcttctcaaagaatttgtttcctcaaaaataaaattattatgacaaattgccttaatagcaatttgctattgactgaagcttcaataacaatttactactgaagcatgatgactgacctatcgtatttccaaagacattcccaggtatagctttgaaagataaaatattgttattctaggaaaattctagtttatattttcactggaggtgctatcaaaagtgctgaaaataaacaaacatgtcaccacaaagtaactttgtaaataagattctaagaaattacactagggctgcaatttaccatggtatttatattataggattatataatcttgtggcaaaacacgtgaagagagagccaattttcacaattttaatttgtaaactcaggaacatttaccatttcttttgtacaagtcaaaaaagtgtgaatatcctttccaaaattttaatagccatagagaatttttttagtgtcatattaattattacctatttttacttagttttgggttcttaaactttacacatgtttaggacttcagtgaacctataccatggagaatanttcggggcttattgttgccattaaaaagtttaaattttctccatttataaaatcctctttttttccccttgctgaaatacatgttcttcttaactaaattttctttccctttttaaataagtttttatgactactttctctttttccataagccctatataaagacttcactcatatctataaaaaacaggctttctaatgttgccttagggaagattaggaagtattcagacataatagcttctatagttattaacatattttataaaatattgccttaaaattcacatgaaaaggacagataatttgcactatgaaatggtctattttagtttttttccttagcaaatgagtttggattagtataaacttgcctattcctagacatgaaacttaacttattctaaaagctaagcagtattttcttctgtataaaggaatgaatggagtctgtgtctgaaaataaagtatatttatctctctgtattccatgtttgttattatcttcccacataacacaggtcataagtgcaagcagagccttatgagggaggaagcaacctattcctcgaaatttaattttttcccactcaggtcaccaatgaaatcatcgaaggataacatgggaaaagtttatatttgcctttgaatctaggagagtttgcaactcacagatgggaaacatcaagaataactgttataccctgaagatataaggaacacattaaagaccaattttcaaatatgctacaaaccacaaatagtgcaggtcctgggaaaatacataattctataaaggtttagaatgtgacactagtcattaatatgacatttaaactgtctttatttaaagaaaatcaataacattcttaaaaactttcagtataggttcattagtactgtatgtcatctaactggtagtaacaaagaagtaaataaattaaaaaacacaaatttataaataaaataaatggtttaagaataatgtgatacatttctaattggcttaatgaagaaaaaagagcaaatattaacacagaaaacataacttttacaaatattaatataaaaattttatctatacacagtggtgagaaataagatttttttctactaagatcagcaacaaggaaagaatataatttctcaccactcttattcaacaatgtaccagaagtcctggcaaacacaataagacataaaaagaaaatgaaagctctacatattgaggaagaaaaaataaaattacttttgcttgtagacagcatgattgtctatgtagaaaatccaaaggctcaacaaaaactcctggaactaataaataatttcagcatgttgcaagataacatataaaaatgcaagataatatacaaggttaatacgtaaaaatcaattgcttttctataaaccaggaatgaacaattagatattgaagttaataactaacatttaaattggcatcaaaaatgaaatatataaatatattaatctaacaaaacatatataagatatatatggaaatacatatatttatatatactatatagtaaatatatatattttcactatggaagtttttagtttttcagatatatgtatttccagatatatatatatatatatattagatatataaaaatatatgtatttccatatataaaaaaaatctatatttcagatatatatctaattagatctatgtctattagatatttgagtctcttttctctctatatataaactttggaatcagtttgttcatatccacaaaatgacttcttgggattttgtttgttgtgattttgtatgaacctgtagatcaagttgggaagaattagattattggatatattagattattatatctaatagatctatatctatatctatatctatggacatatatgtatctggaaaactaaaaaacttccatgatgaaaattgaagaaaatctaaataaatggagaggtattcatgtttatggataagaaaacccaatattgtaaatatgtcttcccaagttgatctacaggttcaaacaaaatctcaacaaacaaaatcccaagaagtcattttgtggatatgaaaaaatggattctaaagtttatatatagagaaaagagactcaaaatggccaagacaaaatagcagaacaaggagaagtgataccacctgaacttcaagatgtactactataaagctacaaaagtcaagacaatgtggtatgaaaagtagacaaataaatcaatggaacagaatagaaagcccagaaatacatctatataactatactcagctggcctttgaaaaagaaggaaggcaatttaaggagaaaggatagtttttcaacaaacggtgctagaacaactggacatccacatgcaaaaaataaatctagacacagactttctacttttcacaaaaattaactgaaaatagatcatacacctaaatgcaaaacacaaaactataaaactcccagaaggtaagatagtagtaaatttagatgtccttgggtatggtgatgactttttagacacaatcataaaaaagaaagaaattttgtcatttgtgacaatgtaggtggacctgaagcgcattatgctgagtaaaacaagccaggcacaaaaatacaagtactgcaagatctcgcttatatgtggactctaaaagtgctccttggtatataatcaaaggaaaacttttgttcatgcaaaacatgtacccagatatttattgcagtgttagtcatctttctgtaggtgaatagatataaacaaactgtggtacagccatacaatggaatattatttagctaaaaaagaaatgagcaagaatgccaaggaaaggtatacggaaaccctaagtacatattactaagtgaaagaagtcgtctgagggggctacatattgtgtaattctaattaattatatcacactctaaaagtaagaactatgaaaacagtaaaagatcaatggttgccaatagtttgggaggagacagggtaggatgaataggtggaaaatgagtgatttttagggcagtgacattattttatatgatattctaatgatgagtacatgtcattattcatttgtcaaaactcacagaacgtacaacacaaagagtgtactcaaatgtacactcgggacttcaattcaaaataatgtctaaatcttgcttcattgattataaaaaatacacaacgctaattcacaatgttaatgattgggaaactatttgtgtgtaaagggggtactatagtttccacataatttttctatataactaaaagttctctaagaatggcctagtgtatgtataagaaataaatttgtaacatcaattaaataattttgtgtgagatatgtaaatgtggctccaagtgaagaaaaataacaatcatgaaaataatgaaaaaagtgttcaataattacctccaaagaagttgctagaatcaagaaactttttgatggaaataattccattgtgaatcagataacttataaactatacacaaaatgacctatattaaaggaaaagttacaaaataattgcatgaatctagaaaatctcagatttcaaaatacagtaaatacagcaaaaaagaaaaagtatattttatacacttttgtggaaaaatcttaaattactagcatctcaaatctgatggcattaaactgtattaaaatggtataaattgtcttaaaattatattacattttctaaaaagttactatgatatgaatattaccaaatacaaatttctccattaatctaagaatatttcaatatataaattcatataattcattgtattactgaagattatatcataaaagatgataataaaagataaagggattattttgatagatgcaaaaataatatttgctgaaaatcacatctatattttaaaaatcttttggtaaaacagaaataggggtgtacttttctatcaagaaaatatacctattttttgatcaaggatatctataccaaccactagtaaaagtcaaactgaatggtcataaaacaatgcagaagtttcattaaaattaacaagactagatatgcggcattatttctgagggctctgttctgttccattcatctatatctctgttttggtaccagtaccatgctgttttggttactgtagccttgtagtgtagtttgaagtcaggtagtgtgatgcctccagctttgttcttttggcttaggattgatttagtgatgcgggctgttttatggttccatatgaactttaaagtagttttttccaattctgtgaagaaagtcattggtagctttatggggatggcattgaatctgtaaattaccttgggcagtatggccattttcacgatattgattcttcctacccatgagcatggaatgttcttccatttgtttgcatcctcttttatttccttgagcagtggtttgtagttctccctgaagaggtccttcacatcccttgtaagttggattcctaggtattttattctctttgaagcaattgtgaatggagtcactcatgattggctctctgttgtctgttgttggttataagaatgcttgtgatttttgtacattgattttgtatcctgagactttgctgaagtcgcttatcagcttaaggagattttgggctgagacaataatgccgcatatctacaactatctgatctttgacaaacctgagaaaaacaagcaatggggaaaggattccctatttaataaacggtgctgggaaaactggctagccatatgtagaaagctgaaactggatcccttccttacaccttatacaaaaatcaattcaagatggattaaagatttaaacgttagacctaaaaccataaaaaccctagaagaaaacctaggcattaccattcaggacataggcatgggcaaggacttcatgtccaaaacaccaaaagcaatggcaacaaaagccaaaattgacaaatgggatctaattaaactaaagagcttctgcacagcaaaagaaactaccatcagaatgaacaggcaacctacaaaatgggagaaaattttcgcaacctactcatctgacaaagggctaatatccagaatctacaatgaactcaaacaaatttacaagaaaaaaacaagcaaccccatcaagaagtgggcgaaggacatgaacagacacttctcaaaagaagacatttatgcagccaaaaacacatgaaaaaatgctcatcatcactggccatcagagaaatgcaaatcaaaaccacaatgagataccatctcacaccagttagaatggcaatcattaaaaagtcaggaaacaacaggtgctggagaggatgtggagaaataggaacacttttacactgttggtgggactgtaaactagttcaaccattgtggaagtcagtgtggtgattcctcagggatctagaactagaaataccatttgacccagccatcccattactgagtatatacccaaatgactataaatcatgctgctataaagacacatgcacaagtatgttcattgcggcattattcacaatagcaaagacctggaaccaacccaaatgtccaacaatgatagactggattaagaaaatgtggcacatatacaccatggagtagtatgcagccataaaaaatgatgagttcatgtcctttgtagggacacggatgaaattggaaatcatcattctcagtaaactatcgcaagaacaaaaaatcaaacaccgcatattctcactcataggtgggaattgaacaatgagatcacatggacacaggaaggggaatatcacactctggggactgtggtggggtatgggtagggggcaggcatagcatcgggagatatacctaatgctagatgacgagttagtgggtgcagcgcaccagcatggcacatgtatacatatgtaactaacctgcacaatgtgcacatgtaccctaaaacttaaagtataataaaaaaaaattaacaagactatgattttacctagttctgaaaaaaaagtaaaaagtataatgtatgaatctagagagagggaaaaactataaatcttaaaaataactaagttcagcagtttctgtagacaaagatggtaatcaatcaattcatttcatgttgataacccttcacacatgaaaaatatttttattcatattagcaacaaaataaatttatttatttatttgagacaggatctcactcctgtttcccaggctggagtgaagtggtgtaatcatggctcactgcagcctccacctcccaggattaggtgattctcctacctcagcctcccagtagctgggactataagtacgcatcaccatacctgagtaatttttttgtattttttacagagataaggtttcatcatgttgcccaggctggtcttgaactcctgacttcaagtgatccgtctcctcttagttccccaaagtgcttggattacagacatgagctactgcacccagcacaaaataaatgtaaaagtggaaagttaacaaagtaaggacaagaaaaaagtggaaaaaaataactgtctggaaaaatagaaaaaaatattttgatggatataaaatatttgaagaaacaattagaaagcttattcttgcaagcttgtcagttttactgaagttgctaccctgttgcaattcccatcgaaatcttttgggaatgttattaaatcttattggaacatggtgataatattctaatgttcacctgaacactgaatatcttaacaggtccccttgcatatgagtagtctgaagaattataataatggggaatttgtgcacctgtaggtttaagtgtaatataaatctaccgtaattaaaatcgtaggccaggcacaatggctcacacctgtaatcccagcactttgggaggccgagaagaaaggatcacttgagaccaagagtttgagaccagcctgggcaatatagggagatcccgtatctacaaaaaatttaaaaattagctgggcatggtggtgcatgcctgtagttccaactactaggaagactgaggtgtaagattgcttgaggcaaggaggcaaaggtttcagtgaagcctagactttgttagtacaatccagcttgggcgacacagggagaccctgtcacaaacaaacaaacaaacaaaaaagatcatatgattctggaccattaaaaaaagaaatgcacctacttctatgcataaaagagtaacagagagtagatttactgttaccttaaacaaatgaaagaatcagacagaatatatgagctaacattttttagactttggacaataggtaacacaaaacgaagtttgctaaaagaaggaaaacaaatgaagtgctccttaaaattgcccagcatatcactggcgagtttccaggaagcaccatatgaggggaaagtcaaacagaatctggtggtctctctgatgtaaagagacaagttgtgaatttgggaggtttgggcggttagaattctcagggtatgatacaggaaagtgttacatggagaagaaagaggtggaaagagacagagagctctggaaatccgtacaagaccttgacatctgcagcacagatatctacatttgaaatccagctcatggcaggctcctgagacctggcacagatggagcacctgaccatgggccattagatacctgaatatgcaaccaaaactgctcacctggattctgggtgctatcggaatcataaagtctctttctattgtttttccttttaaaaataaacacttattttatctctaccacatgactaacactgttacaagtacttacacttaacttatcttacttttcctctaagatgacacctcagctctaggagcctcattttttttccttatcaatcttagtttccttcttgagcattctgctgttgtctgtttcctttctatcatttcttttactagctaattattgaccttctatgccatgcaaggcagcgtgctagattatttaaggcaagagtgggcaaactttttttggtaaaggtctaggtagtaaatatttttggcttagctggccacattgtattggttgcaactattcacctctgcctttgtagtgtaaaaggcatgacaatatgggaatggttgtgcaataagacattgcaaaagaggcagctggatagaattggcacatggatctgatttgttaacctctgaattaagaggctgaagtatcccataccctcaagaaggttgcagtatacgaaaagatttatgtgtatatacacttcattgcaaagcatagtgaaatgagaaaaagaacacgacttcaagtgatgtgtttagaagaataaagagaaaaaacagattaacaaccaaagacttcagttaaaagttttcatgtgagtggccttaaaagatggagagaaaaaaggaatgttgcagttaaaatatttggctaaacaccaaaacaaagggaataaaattgtgaaattttacttattctcacattcattttgatgaattcatggctcagagcagcttctgatgataaattttgaatctagtgctaagtcatttgttacagggttaggtgagcatgtgtcaacttcttgttgctcttaaagtcttagattatttctaacagaaaaccaaaaatgaatgaaatattcttatctaaagtaaagacgatttattattttccagataacatttgaaacaattcagcattctataatgtattgacaataactaggtaaaatcatttatcactctggtagtaaattagccatttatatatgatataataaatgatcacatagaatcaattgtcatatgattgccagtaaagatattcagagattagctgacaaggtatataaaggtataatataataattgtattcaaaagactatcttgaattaatttcaataaccaaaggtaaaaactaggatagtgtattagaccattctcatactgctaataaagacatacccaagactgataatttataaaggaaagaggtttaattaactcacagttcagcatggctggggaggcctcacacttatggtggaaggcaagagaagagccaaggcatatcttgcatggcagcaggcaagaaagtgtttgcagggaaactgccctttataaaaccatcagatctcttgaaacttattcactgtcatgagaacagcatgggaaaaacccacccccatgattaaattacctcccaccgggttcccctccctgacacagggggattatgggatatgatttgagtgaaggcacagcaaccatatctttccaccccagtctctcccaaatctcatgtcctcacatttcaaaaccaatcatgttttcccaacagtcccccaaagtcttaactcatttcagcattaacgcaaaagtccatagtccaaagactcttctgagacaaggcacgtcccttccatttatgagcctttaaaatcaaaagcaagttagatacttcctagatacaatgggagtacaggcattcggtaaatacacccattccaaatgaaataaattggccaaaaggaaggagcaacaggtcccatgcaagtctgaaatccaacagagcagtcaaatcttaaagctccaaaatgatcttctgtgactccatgtctcacatccagggcacactgatgtaagaggtgggctcccacagccttgggtagctccactcttgtggctttgcagggtacagccccccacctggctgctttcatgggctggcattgagtgtacatggctttttcaggctcatggtgcaagtggtcagtggatccactgttctgggatctggaggactgcagccctcttctcacagctccactaggcagtgctccagtggggactctgtttgggggcttcaagcccacattccccttcctcactgccctagcagaagttcttcatgagggccccacccctgcagcacacctctgcctggacatccaggcatttttatacatcatctgaaaactaggcagaagttcccaaacctcattttttgacttctgtgcacctgcaggctcaacaccacacggaagctgtcaaggcttggggcttgcaccctctgaagccacagtctgaggtatagctcggccccttttagccatggctgtagtggctgggatgcagggcaccaagttccaaggctgcacacagcagggggtccctggacccagcccaggaaaccatttttcactcctaggtggccccccagcctgtgatgggaggagctgctgcaaaggtatctgacatacctttgagacgttagtctccttgttacttatgcaaatttctgcagcaggcttgaatttctccctagaaaatgtgtttttcttttctatggcaccatcaggctgcaaattttccaaacttttatgctctgcttcctcttgaacgcttcgctgcttagacattttttccatcagataccccaaatcatctctttcaagttcaaagttccacagatctctagggcaggagcaaaatgccaccagtctctttgctaaatcatagcaagaatcacctatgctttagttcccaacaagttcctcatctccacctgagaccatctcagcctggacttcgttgtccatatcactatcagcatttttgtcaaagccatgcaacaagtctctaggaagttccaaactttccctcatcttcctgtcttctgagccctccaagtctctagggagttccaaaccttcccacatttgtctatcttcttctaagccttccaaactgttccaatctctgcctgttacccagttccaaagttgctttcacattttcaggtgtctttacagcagcaccccactctaccagtaccaatttactgtattatgtattagtccattcttatgctgctaataaagacataaccaagactgtgtaatttataaaggaaagagatttaagtaactcacagttccacatggctggagaggcctcacaatcatggtggaaggcaaaggaggagcaaaggcagaccttatatggcagaaggcaagagagtgtgtgcaggggaatggaccttcataaaaccatcagatctcatgagacttattcactatcatgagaacagcatgagaaaagcctgcccctgtgattcaatgacctcccactgggtcccttccacaaaatgtggggattatgttagctacaatttaggttaaaatttgggtggggatacagccaaaccagatcagatagaatcatagagattagtttgattttataatttgttaattaataggagcttaaatttaagttgatagaatttaaaaattgtaaagaatgctaaatgctatttaccttggccaactgattttaaagattaaaaatctaagaaatatttgacaaatagctcaaggtcactctactaggaaacaaaagcagtgagggctggggacagtggcgcatgcttgtaatcccagaaatttgggaggctgagataggcgaatcacctgagatcaagagttcgagaccatcctggccaacattgtgaaaccccatctctactaaaaatacaaaaatagctaggagttgtggcgcacgcctgtaatcccagctactcgaaaggctgaggcaggagaatcgcttgaacctgggaggtggaggttacagtgagccgagatggtgtcattgcactccagcctgggtgacagtgagattcttgtctcaaaaaagaagaagaaaaaaaaaaaggaaagaaaaaaaaaagaaaaaagaaaaaaaggcagtgagaccttgggcttccatttcaattgcaattttttgatgtgtactcaaattttgaataaaggccttgatttatcagcactatccgtgactcagtaattatcagaaggaggactatttgactacgaagtgacaatatttatctttattataatacatttaaaatggtaatttttcctcttagaatttattgaaaatattctattttcttcaatatcaaattgagctccattatcttttaaaaaaattgccatagctaaataatttgctgggtttagtaattactggagttccatatttacattccagttcctccttgggcctctggcaattccaagtgcagccgaattgcctgtctcataatgtactacagcctattgtgtttgtcccttgaagacttctacatggaaatgggtgcaggtaaaatggagatcagtgatcaacacttaaagctcataggcagacattgcctaggtgtatcttcaaaagagaaagggcagatatttaaagatatcctctttgaccaccatatcttaggatcaggcacttcactctgtaagatgaataaagctttaaataaatatcaacaatattttatcatatgcatatattcatttattacatttttgaataatatatttttcatttatacttttttgattaacaaagaatttaggattacctgaattatagaattttagagcggtaaatacacacaaatacttgcaagagttaaaccaaaaggaaatctgtaattttcagtatagagagggtaggtacaaggaaataaaattgtgatggtgtaggaaaaaaagccaagaaggctaactagatgcagccaggaggaacttctcccatggggaccagaccataagtagagtggtatacgccgaacagatcttcaaaagaaaaaactgaaagtggacagagggaggatgcagaccctggactgaaaggggaggaagctgggtaccctgcatggggttgcctagcacctggaatcattcctggtgccaagtagctcctagggaaggggtgagtgaaatagacatggagtaacccacttttgccacatacctctgggatcatagctgtgggagaccctctgaccccacatacatatgagttggctgggagaactgcccagagggttggggagacagaactccagcctacattgagcccagagggtttggtgtgggaactgtggcagtggagcatggccatgggtctccatccattaaggctcaataaactcctctaggaagcttaggctttgttagctgccatacctggacagagcaggactgtcttgcctgtggatggggccagtctgatctgagtgtccccatgtctgctagcatctcccagggtcctgtctggccacatttgcttagagtgcagcttcagttgcccagccaaggtgcttgccagcagtcactgcctagctctttcactggcacaccctgttggaacacttttgcagacagatcctcacaagcatgcacaagcccacagccttccctcatcagtgtgtgcggtgtgcactcatccgtagcctcccttactgccccactggcgcacatgcacacagggacctgccatcaccatactggagcacttgttccagcagcccccgttggagtttttctgtcagtggactgagaacaccttggcccctccagtgcatcaagcgattaacatcagggagctagagaataaagctctgggcctggtcccagcccttcagggttagagcatgcagcccaggaatgctgacctgagccttgctccttaaagcatctaggaacaaagccaattgactaagcccaacttataccacagtcaagccctcaagggcatcaaagaatataaaagcaaaaagtcccatccaaaccatccaaaagacagcaatttcaaagattaaagaaacaacaacccacacagatgagacagaaccaacataagaactcaggcaactctaaaagccagagcgacttcttacctctaaatgaccatactagctccacaacagtggttcttaaccagactgaaatagttgaaatgacagacatggaattc

SEQ ID NO: 34 - DNA, 2052 bp, Homo sapiens
  Genbank Accession No. Y11307
gcggccgcgtcgacgcgcccccgagcagcgcccgcgccctccgcgccttctccgccgggacctcgagcgaaagacgcccgcccgccgcccagccctcgcctccctgcccaccgggcacaccgcgccgccaccccgaccccgctgcgcacggcctgtccgctgcacaccagcttgttggcgtcttcgtcgccgcgctcgccccgggctactcctgcgcgccacaatgagctcccgcatcgccagggcgctcgccttagtcgtcacccttctccacttgaccaggctggcgctctccacctgccccgctgcctgccactgccccctggaggcgcccaagtgcgcgccgggagtcgggctggtccgggacggctgcggctgctgtaaggtctgcgccaagcagctcaacgaggactgcagcaaaacgcagccctgcgaccacaccaaggggctggaatgcaacttcggcgccagctccaccgctctgaaggggatctgcagagctcagtcagagggcagaccctgtgaatataactccagaatctaccaaaacggggaaagtttccagcccaactgtaaacatcagtgcacatgtattgatggcgccgtgggctgcattcctctgtgtccccaagaactatctctccccaacttgggctgtcccaaccctcggctggtcaaagttaccgggcagtgctgcgaggagtgggtctgtgaccaggatagtatcaaggaccccatggaggaccaggacggcctccttggcaaggagctgggattcgatgcctccgaggtggagttgacgagaaacaatgaattgattgcagttggaaaaggcagctcactgaagcggctccctgtttttggaatggagcctcgcatcctatacaaccctttacaaggccagaaatgtattgttcaaacaacttcatggtcccagtgctcaaagacctgtggaactggtatctccacacgagttaccaatgacaaccctgagtgccgccttgtgaaagaaacccggatttgtgaggtgcggccttgtggacagccagtgtacagcagcctgaaaaagggcaagaaatgcagcaagaccaagaaatcccccgaaccagtcaggtttacttacgctggatgtttgagtgtgaagaaataccggcccaagtactgcggttcctgcgtggacggccgatgctgcacgccccagctgaccaggactgtgaagatgcggttccgctgcgaagatggggagacattttccaagaacgtcatgatgatccagtcctgcaaatgcaactacaactgcccgcatgccaatgaagcagcgtttcccttctacaggctgttcaatgacattcacaaatttagggactaaatgctacctgggtttccagggcacacctagacaaacaagggagaagagtgtcagaatcagaatcatggagaaaatgggcgggggtggtgtgggtgatgggactcattgtagaaaggaagccttgctcattcttgaggagcattaaggtatttcgaaactgccaagggtgctggtgcggatggacactaatgcagccacgattggagaatactttgcttcatagtattggagcacatgttactgcttcattttggagcttgtggagttgatgactttctgttttctgtttgtaaattatttgctaagcatattttctctaggcttttttcctttggggcttctacagtcgtaaaagagataataagattagttggacagtttaaagcttttattcgtcctttgacaaaagtaaatgggagggcattccatcccttcctgaagggggacactccatgagtgtctgtgagaggcagctatctgcactctaaactgcaaacagaaatcaggtgttttaagactgaatgttttatttatcaaaatgtagcttttggggagggaggggaaatgtaatactggaataatttgtaaatgattttaattttatattcagtgaaaagattttatttatggaattaaccatttaataaagaaatatttacctaaaaaaaagtcgacgcggccgc

SEQ ID NO: 35 - DNA, 2025 bp, Homo sapiens
  Genbank Accession No. Z98053
ggcacgagggcgcccccgagcagcgcccgcgccctccgcgccttctccgccgggacctcgagcgaaagacgcccgcccgccgcccagccctcgcctccctgcccaccgggcccaccgcgccgccaccccgaccccgctgcgcacggcctgtccgctgcacaccagcttgttggcgtcttcgtcgccgcgctcgccccgggctactcctgcgcgccacaatgagctcccgcatcgccagggcgctcgccttagtcgtcacccttctccacttgaccaggctggcgctctccacctgccccgctgcctgccactgccccctggaggcgcccaagtgcgcgccgggagtcgggctggtccgggacggctgcggctgctgtaaggtctgcgccaagcagctcaacgaggactgcagcaaaacgcagccctgcgaccacaccaaggggctggaatgcaacttcggcgccagctccaccgctctgaaggggatctgcagagctcagtcagagggcagaccctgtgaatataactccagaatctaccaaaacggggaaagtttccagcccaactgtaaacatcagtgcacatgtattgatggcgccgtgggctgcattcctctgtgtccccaagaactatctctccccaacttgggctgtcccaaccctcggctggtcaaagttaccgggcagtgctgcgaggagtgggtctgtgacgaggatagtatcaaggaccccatggaggaccaggacggcctccttggcaaggagctgggattcgatgcctccgaggtggagttgacgagaaacaatgaattgattgcagttggaaaaggcagctcactgaagcggctccctgtttttggaatggagcctcgcatcctatacaaccctttacaaggccagaaatgtattgttcaaacaacttcatggtcccagtgctcaaagacctgtggaactggtatctccacacgagttaccaatgacaaccctgagtgccgccttgtgaaagaaacccggatttgtgaggtgcggccttgtggacagccagtgtacagcagcctgaaaaagggcaagaaatgcagcaagaccaagaaatcccccgaaccagtcaggtttacttacgctggatgtttgagtgtgaagaaataccggcccaagtactgcggttcctgcgtggacggccgatgctgcacgccccagctgaccaggactgtgaagatgcggttccgctgcgaagatggggagacattttccaagaacgtcatgatgatccagtcctgcaaatgcaactacaactgcccgcatgccaatgaagcagcgtttcccttctacaggctgttcaatgacattcacaaatttagggactaaatgctacctgggtttccagggcacacctagacaaacaagggagaagagtgtcagaatcagaatcatggagaaaatgggcgggggtggtgtgggtgatgggactcattgtagaaaggaagccttgctcattcttgaggagcattaaggtatttcgaaactgccaagggtgctggtgcggatggacactaatgcagccacgattggagaatactttgcttcatagtattggagcacatgttactgcttcattttggagcttgtggagttgatgactttctgttttctgtttgtaaattatttgctaagcatattttctctaggcttttttccttttggggttctacagtcgtaaaagagataataagattagttggacagtttaaagcttttattcgtcctttgacaaaagtaaatgggagggcattccatcccttcctgaagggggacactccatgagtgtctgtgagaggcagctatctgcactctaaactgcaaacagaaatcaggtgttttaagactgaatgttttatttatcaaaatgtagcttttggggagggaggggaaatgtaatactggaataatttgtaaatgattttaattttatattcagtgaaaagattttatttatggaattaaccatttaataaagaaatatttacct

SEQ ID NO: 36 - DNA, 2021 bp, Homo sapiens
  Genbank Accession No. Y12084
cgagagcgcccccgagcagcgcccgcgccctccgcgccttctccgccgggacctcgagcgaaagacgcccgcccgccgcccagccctcgcctccctgcccaccgggcacaccgcgccgccaccccgaccccgctgcgcacggcctgtccgctgcacaccagcttgttggcgtcttcgtcgccgcgctcgccccgggctactcctgcgcgccacaatgagctcccgcatcgccagggcgctcgccttagtcgtcacccttctccacttgaccaggctggcgctctccacctgccccgctgcctgccactgccccctggaggcgcccaagtgcgcgccgggagtcgggctggtccgggacggctgcggctgctgtaaggtctgcgccaagcagctcaacgaggactgcagcaaaacgcagccctgcgaccacaccaaggggctggaatgcaacttcggcgccagctccaccgctctgaaggggatctgcagagctcagtcagagggcagaccctgtgaatataactccagaatctaccaaaacggggaaagtttccagcccaactgtaaacatcagtgcacatgtattgatggcgccgtgggctgcattcctctgtgtccccaagaactatctctccccaacttgggctgtcccaaccctcggctggtcaaagttaccgggcagtgctgcgaggagtgggtctgtgacgaggatagtatcaaggaccccatggaggaccaggacggcctccttggcaaggagctgggattcgatgcctccgaggtggagttgacgagaaacaatgaattgattgcagttggaaaaggcagctcactgaagcggctccctgtttttggaatggagcctcgcatcctatacaaccctttacaaggccagaaatgtattgttcaaacaacttcatggtcccagtgctcaaagacctgtggaactggtatctccacacgagttaccaatgacaaccctgagtgccgccttgtgaaagaaacccggatttgtgaggtgcggccttgtggacagccagtgtacagcagcctgaaaaagggcaagaaatgcagcaagaccaagaaatcccccgaaccagtcaggtttacttacgctggatgtttgagtgtgaagaaataccggcccaagtactgcggttcctgcgtggacggccgatgctgcacgccccagctgaccaggactgtgaagatgcggttccgctgcgaagatggggagacattttccaagaacgtcatgatgatccagtcctgcaaatgcaactacaactgcccgcatgccaatgaagcagcgtttcccttctacaggctgttcaatgacattcacaaatttagggactaaatgctacctgggtttccagggcacacctagacaaacaagggagaagagtgtcagaatcagaatcatggagaaaatgggcgggggtggtgtgggtgatgggactcattgtagaaaggaagccttgctcattcttgaggagcattaaggtatttcgaaactgccaagggtgctggtgcggatggacactaatgcagccacgattggagaatactttgcttcatagtattggagcacatgttactgcttcattttggagcttgtggagttgatgactttctgttttctgtttgtaaattatttgctaagcatattttctctaggcttttttccttttggggttctacagtcgtaaaagagataataagattagttggacagtttaaagcttttattcgtcctttgacaaaagtaaatgggagggcattccatcccttcctgaagggggacactccatgagtgtctgtgagaggcagctatctgcactctaaactgcaaacagaaatcaggtgttttaagactgaatgttttatttatcaaaatgtagcttttggggagggaggggaaatgtaatactggaataatttgtaaatgattttaattttatattcagtgaaaagattttatttatggaattaaccatttaataaagaaatatttacct

SEQ ID NO: 37 - DNA, 2016 bp, Homo sapiens
  Genbank Accession No. U62015
ggcacgaggagcagcgcccgcgccctccgcgccttctccgccgggacctcgagcgaaagacgcccgcccgccgcccagccctcgcctccctgcccaccgggcccaccgcgccgccaccccgaccccgctgcgcacggcctgtccgctgcacaccagcttgttggcgtcttcgtcgccgcgctcgccccgggctactcctgcgcgccacaatgagctcccgcatcgccagggcgctcgccttagtcgtcacccttctccacttgaccaggctggcgctctccacctgccccgctgcctgccactgccccctggaggcgcccaagtgcgcgccgggagtcgggctggtccgggacggctgcggctgctgtaaggtctgcgccaagcagctcaacgaggactgcagcaaaacgcagccctgcgaccacaccaaggggctggaatgcaacttcggcgccagctccaccgctctgaaggggatctgcagagctcagtcagagggcagaccctgtgaatataactccagaatctaccaaaacggggaaagtttccagcccaactgtaaacatcagtgcacatgtattgatggcgccgtgggctgcattcctctgtgtccccaagaactatctctccccaacttgggctgtcccaaccctcggctggtcaaagttaccgggcagtgctgcgaggagtgggtctgtgacgaggatagtatcaaggaccccatggaggaccaggacggcctccttggcaaggagctgggattcgatgcctccgaggtggagttgacgagaaacaatgaattgattgcagttggaaaaggcagctcactgaagcggctccctgtttttggaatggagcctcgcatcctatacaaccctttacaaggccagaaatgtattgttcaaacaacttcatggtcccagtgctcaaagacctgtggaactggtatctccacacgagttaccaatgacaaccctgagtgccgccttgtgaaagaaacccggatttgtgaggtgcggccttgtggacagccagtgtacagcagcctgaaaaagggcaagaaatgcagcaagaccaagaaatcccccgaaccagtcaggtttacttacgctggatgtttgagtgtgaagaaataccggcccaagtactgcggttcctgcgtggacggccgatgctgcacgccccagctgaccaggactgtgaagatgcggttccgctgcgaagatggggagacattttccaagaacgtcatgatgatccagtcctgcaaatgcaactacaactgcccgcatgccaatgaagcagcgtttcccttctacaggctgttcaatgacattcacaaatttagggactaaatgctacctgggtttccagggcacacctagacaaacaagggagaagagtgtcagaatcagaatcatggagaaaatgggcgggggtggtgtgggtgatgggactcattgtagaaaggaagccttgctcattcttgaggagcattaaggtatttcgaaactgccaagggtgctggtgcggatggacactaatgcagccacgattggagaatactttgcttcatagtattggagcacatgttactgcttcattttggagcttgtggagttgatgactttctgttttctgtttgtaaattatttgctaagcatattttctctaggcttttttccttttggggttctacagtcgtaaaagagataataagattagttggacagtttaaagcttttattcgtcctttgacaaaagtaaatgggagggcattccatcccttcctgaagggggacactccatgagtgtctgtgagaggcagctatctgcactctaaactgcaaacagaaatcaggtgttttaagactgaatgttttatttatcaaaatgtagcttttggggagggaggggaaatgtaatactggaataatttgtaaatgattttaattttatattcagtgaaaagattttatttatggaattaaccatttaataaagaaatatttacct

SEQ ID NO: 38 - DNA, 1887 bp, Homo sapiens
  Genbank Accession No. AF031385
gcgcacggcctgtccgctgcacaccagcttgttggcgtcttcgtcgccgcgctcgccccgggctactcctgcgcgccacaatgagctcccgcatcgccagggcgctcgccttagtcgtcacccttctccacttgaccaggctggcgctctccacctgccccgctgcctgccactgccccctggaggcgcccaagtgcgcgccgggagtcgggctggtccgggacggctgcggctgctgtaaggtctgcgccaagcagctcaacgaggactgcagcaaaacgcagccctgcgaccacaccaaggggctggaatgcaacttcggcgccagctccaccgctctgaaggggatctgcagagctcagtcagagggcagaccctgtgaatataactccagaatctaccaaaacggggaaagtttccagcccaactgtaaacatcagtgcacatgtattgatggcgccgtgggctgcattcctctgtgtccccaagaactatctctccccaacttgggctgtcccaaccctcggctggtcaaagttaccgggcagtgctgcgaggagtgggtctgtgacgaggatagtatcaaggaccccatggaggaccaggacggcctccttggtaaggagctgggattcgatgcctccgaggtggagttgacgagaaacaatgaattgattgcagttggaaaaggcagctcactgaagcggatccctgtttttggaatggagcctcgcatccgatacaaccctttacaaggccagaaatgtattgttcaaacaacttcatggtcccagtgctcaaagacctgtggaactggtatctccacacgagttaccaatgacaaccctgagtgccgccttgtgaaagaaacccggatttgtgaggtgcggccttgtggacagccagtgtacagcagcctgaaaaagggcaagaaatgcagcaagaccaagaaatcccccgaaccagtcaggtttacttacgctggatgtttgagtgtgaagaaataccggcccaagtactgcggttcctgcgtggacggccgatgctgcacgccccagctgaccaggactgtgaagatgcggttccgctgcgaagatggggagacattttccaagaacgtcatgatgatccagtcctgcaaatgcaactacaactgcccgcatgccaatgaagcagcgtttcccttctacaggctgttcaatgacattcacaaatttagggactaaatgctacctgggtttccagggcacacctagacaaacaagggagaagagtgtcagaatcagaatcatggagaaaatgggcgggggtggtgtgggtgatgggactcattgtagaaaggaagccttgctcattcttgaggagcattaaggtatttcgaaactgccaagggtgctggtgcggatggacactaatgcagccacgattggagaatactttgcttcatagtattggagcacatgttactgcttcattttggagcttgtggagttgatgactttctgttttctgtttgtaaattatttgctaagcatattttctctaggcttttttccttttggggttctacagtcgtaaaagagataataagattagttggacagtttaaagcttttattcgtcctttgacaaaagtaaatgggagggcattccatcccttcctgaagggggacactccatgagtgtctgtgagaggcagctatctgcactctaaactgcaaacagaaatcaggtgttttaagactgaatgttttatttatcaaaatgtagcttttggggagggaggggaaatgtaatactggaataatttgtaaatgattttaattttatattcagtgaaaagattttatttatggaattaaccatttaataaagaaatatttacct

SEQ ID NO: 39 - DNA, 2776 bp, Homo sapiens
  Genbank Accession No. AF015257
ggaaaacgacacctagaagtaggagtgagattcgctgaagttcccttctgaggaagacccacccctccgcctggagagccggggctggcggtgcctgaggaccccttcggcctggacagcccacgcgggcttggggggcctcgctctgccctcatggggcggccatcggttcccgaagcggcgagtgaaaattcaaatggccagtagggggcgcactcggaagtggccgccccgcatgaggcagttcagcggccccgagagtccggggagggaggtttattctccgcctgcacgagactgtgaaatccgcaaccatgagcaggagaggcggccctggtggggaagaggccaccaacatctggacggcaggtacccagagagtgagcagctccacgcgggactgtgcacggtggccgacacccgcagggacgcccgccggacgagcacgcggagggccctcgcctccacggatgcaccatgccggtgtgaggagcatctgttcttcccactctctgcagttaacaaacccaacccaaaccaccacaggtgctcctcctggggagtttcctgtctgacaaatgccaggctcacttcaaggagaatcacgcttctttctaaagatggattcaccatttaaaacagagctctgggagcctttcggcaaatcttgaaagctgcacggcgcagagacatggatgtgacttcccaagcccggggcgtgggcctggagatgtacccaggcaccgcgcagcctgcggcccccaacaccacctcccccgagctcaacctgtcccacccgctcctgggcaccgccctggccaatgggacaggtgagctctcggagcaccagcagtacgtgatcggcctgttcctctcgtgcctctacaccatcttcctcttccccatcggctttgtgggcaacatcctgatcctggtggtgaacatcagcttccgcgagaagatgaccatccccgacctgtacttcatcaacctggcggtggcggacctcatcctggtggccgactccctcattgaggtgttcaacctgcacgagcggtactacgacatcgccgtcctgtgcaccttcatgtcgctcttcctgcaggtcaacatgtacagcagcgtcttcttcctcacctggatgagcttcgaccgctacatcgccctggccagggccatgcgctgcagcctgttccgcaccaagcaccacgcccggctgagctgtggcctcatctggatggcatccgtgtcagccacgctggtgcccttcaccgccgtgcacctgcagcacaccgacgaggcctgcttctgtttcgcggatgtccgggaggtgcagtggctcgaggtcacgctgggcttcatcgtgcccttcgccatcatcggcctgtgctactccctcattgtccgggtgctggtcagggcgcaccggcaccgtgggctgcggccccggcggcagaaggcgctccgcatgatcctcgcggtggtgctggtcttcttcgtctgctggctgccggagaacgtcttcatcagcgtgcacctcctgcagcggacgcagcctggggccgctccctgcaagcagtctttccgccatgcccaccccctcacgggccacattgtcaacctcgccgccttctccaacagctgcctaaaccccctcatctacagctttctcggggagaccttcagggacaagctgaggctgtacattgagcagaaaacaaatttgccggccctgaaccgcttctgtcacgctgccctgaaggccgtcattccagacagcaccgagcagtcggatgtgaggttcagcagtgccgtgtagacagccttggccgcataggcccagccagggtgtgactcgggagctgcacacacctgggtggacacaaggcacggccacgtcatgtctctaaactgcggtcagatgtggcttctggctcctcggggcctcgcgagggtcacgcttgcctggtcaccctggggctgcttaggaaacctcacgactggtcaccttgcactcttcacacagaattgctacaatcccaaagcgctcgccccgcagggtccaaaggccagcggtgaccagcctgtcacccagctcctccccgccaaccctgcctgccgctgcacctgcctgccgctgcaggaaacatttgacaccgtcgaccaggaaagccacacggagaggccactgtgggtgaagcgcctcagttacacaggaaccctaaagcaaatctgccaccgtgggggaactgacgctggagatgcaaggtgctggtgggtctgagctggacgtcgcggtgtgtcctctgtgcccacggtctgagctagctagcgcaccgccgagttaaagaggagaaggaaaacatgctgctctggtgcacgcctgagcgtcctccatcttccaggatggcagcaatggcgctgtgcggcctcaccaggcccacgaggagcagcagcgctcggcccggagcagcaggaaggcccctctgtggagcgcccgccgtctgctccggggtggttcagtcactgcttgttgacatcaacatggcaattgcactcatgtggactgggaccgtgcgagctgccgtgtgggttagtcgggtgccaggacaatgaaatactccagcacgtgtggctgacgaatttgtttctacagaaataacagctggggacaactgcggtgatgatgtaaaaaccttcccataaaatgtaagaaaagctgatgaggctggtgacgttcagcctttgtcaataaacctgtcatgtgcggatcctt

SEQ ID NO: 40 - DNA, 2604 bp, Homo sapiens
  Genbank Accession No. U63917
cagccagccgggaaccttccctcgcgggctcccagggcgggtctcttcctctctctagccctgctcaggcattcggcaggtccagcagaggtacacctcctgcagcgggttccaagtgcacctccagcctgatgggcctgaccaaggaggcttccaggagcacagaaggggctgcaacccaggtacccagagagtgagcagctccacgcgggactgtgcacggtggccgacacccgcagggacgcccgccggacgagcacgcggagggccctcgcctccacggatgcaccatgccggtgtgaggagcatctgttcttcccactctctgcagttaacaaacccaacccaaaccaccacaggtgctcctcctggggagtttcctgtctgacaaatgccaggctcacttcaaggagaatcacgcttctttctaaagatggattcaccatttaaaacagagctctgggagcctttcggcaaatcttgaaagctgcacggtgcagagacatggatgtgacttcccaagcccggggcgtgggcctggagatgtacccaggcaccgcgcagcctgcggcccccaacaccacctcccccgagctcaacctgtcccacccgctcctgggcaccgccctggccaatgggacaggtgagctctcggagcaccagcagtacgtgatcggcctgttcctctcgtgcctctacaccatcttcctcttccccatcggctttgtgggcaacatcctgatcctggtggtgaacatcagcttccgcgagaagatgaccatccccgacctgtacttcatcaacctggcggtggcggacctcatcctggtggccgactccctcattgaggtgttcaacctgcacgagcggtactacgacatcgccgtcctgtgcaccttcatgtcgctcttcctgcaggtcaacatgtacagcagcgtcttcttcctcacctggatgagcttcgaccgctacatcgccctggccagggccatgcgctgcagcctgttccgcaccaagcaccacgcccggctgagctgtggcctcatctggatggcatccgtgtcagccacgctggtgcccttcaccgccgtgcacctgcagcacaccgacgaggcctgcttctgtttcgcggatgtccgggaggtgcagtggctcgaggtcacgctgggcttcatcgtgcccttcgccatcatcggcctgtgctactccctcattgtccgggtgctggtcagggcgcaccggcaccgtgggctgcggccccggcggcagaaggcgctccgcatgatcctcgcggtggtgctggtcttcttcgtctgctggctgccggagaacgtcttcatcagcgtgcacctcctgcagcggacgcagcctggggccgctccctgcaagcagtctttccgccatgcccaccccctcacgggccacattgtcaacctcgccgccttctccaacagctgcctaaaccccctcatctacagctttctcggggagaccttcagggacaagctgaggctgtacattgagcagaaaacaaatttgccggccctgaaccgcttctgtcacgctgccctgaaggccgtcattccagacagcaccgagcagtcggatgtgaggttcagcagtgccgtgtagacagccttggccgcataggcccagccagggtgtgactcgggagctgcacacacctgggtggacacaaggcacggccacgtcatgtctctaaactgcggtcagatgtggcttctggctcctcggggcctcgcgagggtcacgcttgcctggtcaccctggggctgcttaggaaacctcacgactggtcaccttgcactcctcacacagaattgctacaatcccaaagcgctcgccccgcagggtccaaaggccagcggtgaccagcctgtcacccagctcctccccgccaaccctgcctgccgctgcacctgcctgccgctgcaggaaacatttctgacaccgtcgaccaggaaagccacacggagaggccactgtgggtgaagcgcctcagttacacaggaaccctaaagcaaatctgccaccgtgggggaactgacgctggagatgcaaggtgctggtgggtctgagctggacgtcgcggtgtgtcctctgtgcccacggtctgagctagctagcgcaccgccgagttaaagaggagaaggaaaacatgctgctctggtgcacgcctgagcgtcctccatcttccaggatggcagcaatggcgctgtgcgcctcaccaggcccacgaggagcagcagcgctcggcccggagcagcaggaaggcccctctgtggagcgcccgccgtctgctccggggtggttcagtcactgcttgttgacatcaacatggcaattgcactcatgtggactgggaccgtgcgagctgccgtgtgggttagtcgggtgccaggacaatgaaatactccagcacctgtggctgacgaatttgtttctacagaaataacagctggggacaactgcggtgatgatgtaaaaaccttcccataaaatgtaagaaaagctgatgaggctggtgacgttcagcctttgtcaataaacctgtcatgtgcggaaaaaaaaaaaaaaaaaaaa

SEQ ID NO: 41 - DNA, 1520 bp, Homo sapiens
  Genbank Accession No. AF177394
ccacgcgtccgcggacgcgtgggcggcacggtttcgtggggacccaggcttgcaaagtgacggtcattttctctttctttctccctcttgagtccttctgagatgatggctctgggcgcagcgggagctacccgggtctttgtcgcgatggtagcggcggctctcggcggccaccctctgctgggagtgagcgccaccttgaactcggttctcaattccaacgctatcaagaacctgcccccaccgctgggcggcgctgcggggcacccaggctctgcagtcagcgccgcgccgggaatcctgtacccgggcgggaataagtaccagaccattgacaactaccagccgtacccgtgcgcagaggacgaggagtgcggcactgatgagtactgcgctagtcccacccgcggaggggacgcaggcgtgcaaatctgtctcgcctgcaggaagcgccgaaaacgctgcatgcgtcacgctatgtgctgccccgggaattactgcaaaaatggaatatgtgtgtcttctgatcaaaatcatttccgaggagaaattgaggaaaccatcactgaaagctttggtaatgatcatagcaccttggatgggtattccagaagaaccaccttgtcttcaaaaatgtatcacaccaaaggacaagaaggttctgtttgtctccggtcatcagactgtgcctcaggattgtgttgtgctagacacttctggtccaagatctgtaaacctgtcctgaaagaaggtcaagtgtgtaccaagcataggagaaaaggctctcatggactagaaatattccagcgttgttactgtggagaaggtctgtcttgccggatacagaaagatcaccatcaagccagtaattcttctaggcttcacacttgtcagagacactaaaccagctatccaaatgcagtgaactccttttatataatagatgctatgaaaaccttttatgaccttcatcaactcaatcctaaggatatacaagttctgtggtttcagttaagcattccaataacaccttccaaaaacctggagtgtaagagctttgtttctttatggaactcccctgtgattgcagtaaattactgtattgtaaattctcagtgtggcacttacctgtaaatgcaatgaaacttttaattatttttctaaaggtgctgcactgcctatttttcctcttgttatgtaaatttttgtacacattgattgttatcttgactgacaaatattctatattgaactgaagtaaatcatttcagcttatagttcttaaaagcataaccctttaccccatttaattctagagtctagaacgcaaggatctcttggaatgacaaatgataggtacctaaaatgtaacatgaaaatactagcttattttctgaaatgtactatcttaatgcttaaattatatttccctttaggctgtgatagtttttgaaataaaatttaacatttaatatcatgaaatgttataagtagacataaaaaaaaaaaaaaaaaaaaaa

SEQ ID NO: 42 - DNA, 1554 bp, Homo sapiens
  Genbank Accession No. AF127563
ggccattaccaatcgcgaaaccccgcagggggctcccggaccctgactctgcagccgaaccggcacggtttcctggggacccaggcttgcaaagtgacggtcattttctccttctttctccctcttgagtccttctgagatgatggctctgggcgcagcgggagctacccgggtctttgtcgcgatggtagcggcggctctcggcggccaccctctgctgggagtgagcgccaccttgaactcggttctcaattccaacgctatcaagaacctgcccccaccgctgggcggcgctgcggggcacccaggctctgcagtcagcgccgcgccgggaatcctgtacccgggcgggaataagtaccagaccattgacaactaccagccgtacccgtgcgcagaggacgaggagtgcggcactgatgagtactgcgctagtcccacccgcggaggggacgcgggcgtgcaaatctgtctcgcctgcaggaagcgccgaaaacgctgcatgcgtcacgctatgtgctgccccgggaattactgcaaaaatggaatatgtgtgtcttctgatcaaaatcatttccgaggagaaattgaggaaaccatcactgaaagctttggtaatgatcatagcaccttggatgggtattccagaagaaccaccttgtcttcaaaaatgtatcacaccaaaggacaagaaggttctgtttgtctccggtcatcagactgtgcctcaggattgtgttgtgctagacacttctggtccaagatctgtaaacctgtcctgaaagaaggtcaagtgtgtaccaagcataggagaaaaggctctcatggactagaaatattccagcgttgttactgtggagaaggtctgtcttgccggatacagaaagatcaccatcaagccagtaattcttctaggcttcacacttgtcagagacactaaaccagctatccaaatgcagtgaactccttttatataatagatgctatgaaaaccttttatgaccttcatcaactcaatcctaaggatatacaagttctgtggtttcagttaagcattccaataacaccttccaaaaacctggagtgtaagagctttgtttctttatggaactcccctgtgattgcagtaaattactgtattgtaaattctcagtgtggcacttacctgtaaatgcaatgaaacttttaattatttttctaaaggtgctgcactgcctatttttcctcttgttatgtaaatttttgtacacattgattgttatcttgactgacaaatattctatattgaactgaagtaaatcatttcagcttatagttcttaaaagcataaccctttaccccatttaattctagagtctagaacgcaaggatctcttggaatgacaaatgataggtacctaaaatgtaacatgaaaatactagcttattttctgaaatgtactatcttaatgcttaaattatatttccctttaggctgtgatagtttttgaaataaaatttaacatttaatatcatgaaaaaaaaaaaaaaaaaaaaaaaaaaaaaaaaaaaaaa

SEQ ID NO: 43 - DNA, 2280 bp, Homo sapiens
  Genbank Accession No. U17077
ccgcccgccaccagctacgccccgtccgacgtgccctcgggggtcgcgctgttcctcaccatccctttcgccttcttcctgcccgagctgatatttgggttcttggtctggaccatggtagccgccacccacatagtataccccttgctgcaaggatgggtgatgtatgtctcgctcacctcgtttctcatctccttgatgttcctgttgtcttacttgtttggattttacaaaagatttgaatcctggagagttctggacagcctgtaccacgggaccactggcatcctgtacatgagcgctgccgtcctacaagtacatgccacgattgtttctgagaaactgctggacccaagaatttactacattaattcggcagcctcgttcttcgccttcatcgccacgctgctctacattctccatgccttcagcatctattaccactgatgcacaggcgccaggccaagggggaaatgctctttgaaagctccaattattggtccccaaaagcagcttccaacgtttgccatctggatgacaaacggaagatccactaaaacgtccacgggattaacagaacgtccttgcagactgagcgatgacaccacactttgtttggacatttaaattcactctgctgaataggaggaagcttttctttttcctgggaaaacaactgtctcttggaattatctgaccatgaacttgctcttctagacaactcacatcaaagccctcactccactaatggagaatcctagccccactaatgccaagtctgtttggggattttgcctcagctatgggcttccctagagtaggtctaggggaatactcagtctgatcttttttttgtttgttttattttgttttttttgagacggagtctcgctcttcctccaaggctggagtgcagtgacgcgatctccactcactgcaggctccgcctcccgggttcccgccattctcctgcctcagcctcccgagtagccgggactacaggcgcccaccaccatgcccggctaatttagttgtatttttagtagagatggggtttcaccgtattagccaggatggtctcgatctcctgacctcgtgatccgcccgcctcggcctcccaaagtgctgggattacaggcgtgagccaccgtgcccggcctgattctcttaaaattgaagaggtgctgccaaggccttcagatctaacgcagatgcatagaccttgttcctggtacttgttcagcctgtgctggggagccgtggtcccgagttccctgggaggctgacagggtcaagccaccctgcccaccaccctcccacttcccctcccctttcctctccagcattaggattcaagggaaatctgcatgaagccaattttgagggtagacgtgtggggaaaataaatcattatacagtaagacctggggcttgaggggtggggaatggggagggaagggcatagcctgctcctccatgagtctgacatctcggaaactgagcagctgccggacgcctgggtcaggaatccaagaccccacctcttaaggactggttcctcagaaagcaccctcagggaaaaaggtgaaaacattacatccgtggattctcctgccacaaccgcattggaagaaaaggctgccgcaacatctcagcgaggagtgaaggacccatgtcccaggaaccgcgctgcgccacctgcactcacccccctcacattctcttaagcacccggtggccctccgaggctggcggaatggtggtgcccacggggttgggcaagggctcaccaggacctcaacgggcaaagttgtgcacactaaaatatcaaatcaaggtgcttggttttaaagtaaatgtttttctaaagaaagctgtgttcttctgttgacccagacgaatagggcacagccctgtaactgcacgtgccttctgtcattgggaatgaaataaattattacgagaaagggacttgtcctaactggtttgaggccttacagttttgtatctacatttttcccctcctggggtttgcggggacagggacagaactacaggagtcatgggaaagaaaattctggcttcactactgctcactgctcactttctgatcactctgatactttttttttttttttttttttgcaacctgataccttgaaaagcttctatgtgtctctccttttgttgcctggcagctgtctaggatgatcactgattactatttactaagtagccacatgcaaataaaagttgtttggtaaaatggaaaaaaaaaaa

SEQ ID NO: 44 - DNA, 579 bp, Homo sapiens
  Genbank Accession No. U17079
cccggggagcccgctcctccacctgcactcaccccctcacattctcttaagcaccctgtggcccttcgaggctgggcagaatggtggtgcccacgggttgggccagggctcaacgggcaaagttgtgcacactaaaatatcaaatcaaggtgcttggttttaaagtaaatgtttttctaaagaaagctgtgctcttctgctgacccagatgagtagggcacagcctgtaactgcacttgccttctgtcatttggaatgaaataaattatgagaaaggggcttcttaactgattcgagtgcttacagtttagtatcaacctttttctcctcctggggtttgcaggggcagggacagaactacaggagtcctgggaaagaaaattctggcttcattactgctcactgctcactttctatcactctaatactttttttttgcaacctgataccttgaaaaggcaccatgtgtctcccttttgttgctgggcagctgtctaggatgatcactgtttaatatttactaagtagccacatgcaaataaaagttgtttgtgtggtaaaaaggagcagttggtcgac

SEQ ID NO: 45 - DNA, 6720 bp, Homo sapiens
  Genbank Accession No. D83402
  unsure (1)..(6720): n = a or c or g or t
ctctctgcagatttgtgttccttgtgctggtgcacttggacttggagctgatcaacgcagatgtggagatccctgagtttgacctcagcaggtacggcttcggtctgatgcagccggaacacgacgtgcccgtccgctaccgcatccgcccatgacacagggagcagatggatccacgtgctcgcctctgcccagcctgccccagcctgccccagcctcccagctttctgtgtgcacagttggcccgggtgcaggtgctagcattaccacttccctgcttttctcccagaaggctgggtccaggggagggaaaagctaagagggtgaacaaagaaaagacattgaaagctctatggattatccactgcaaagttttctttccaaaatcaggctttgtctgctcccaattcacctcgttactctcacctcgtgatatccacaaatgctattcagataaggcagaactaggagtcttcactgctctgcccccaactcccggaggtgtcaccttcctagttcttatgagctagcatggcccgggscttatccagttcaaagcggatgctggccacagaaaggccactcaggatgtcctttgtgtccattgatgtcattcagcagtcagtcccccaataatccttaaactagctaaaaccaaaggagtcccttagaagatctgcttccctggggccccatttgccagattgccccattgctcacactacttgagaaaatgcaggagagcttcccccaaggctgatgcattcccggtgcagaacaggggcaccctccaaacactgggctctgaggagtggagttctctgttctagagtnacaggcaccagatgggatgggctttctcagtgtcagcactcaggtagggagctaaggaagacacagcccagacaagatggctggaaggagccagccaggactccttagactgatcaagccaaaaaagaaggtgccgatttcatgcattctagtgcagaagccccaactgtgatcacgatccagtctgcagacgtgttttgtttggacttcacttaaaaaaatgccttagttgttatcatctttgggagagttcattcaaaatgtccagcttctcttgaaaacttggtatatctggccacactgggctcacattcccaagggtaactcttggccagagctgagtggcagccgcctcccttatgcaggacatgtgctctcggcttcaccagggttctgaccgggtctgcttctgcattcacagcgsctcctggrcctgaaggcatctgagtgtgagaccctgttctaactcttagaagtgacattgtaagaggtggtggggaccagctaattggtccaacccagcctgagtgcaccaccctttgaacaaatgtatcagtgatgaaaatttgcctttgccccggcttgcctgtaatcccagcactttgggaggccgaggtgggcggatcacttgaggtcgggagttcaagaccagcctggccaacatggcgaaaccccgtctctactaaacataaaaaaattagtcaggtgtggcggtgccgtgcctgtaatcccagctattcaggaggctgaggcaccagaattgcttgaacccaggaggtggaggttgcagtgaactgaagactgcgccacggcactccagcctgggcgacagagcaagactctgtctcaataaataaataattaattaaaataaaaaacagcttaaagagaaaaatggcctgcaaaccttttttatgatgctatttttattaatataaagtcctgtttattgagaccctttaaatgcctgcgagagaccctacagacagtatgtctactcctcacagcatctctatgaagagaaggagggttgtgcccacttcatagatgagaaaactgagaggtgaggtgacttgcctggggccacatagctcataarctgtagaactctgcaggcagatttactgtcccaggagcaaatgctggatgagcaactcctgttctttgggctcaaggggactggtgatgggacaattcttctcgacttcaggagctgacagagccagaggcacctaaacttgggtacatcttgtaagacacataatgaggtccctctagctttagctggagggagataaaagaaccccagacctctgaatgtcccagaggctagtctcttctcagagcagcactggggtttgggggcttccctgggcctcagcctccaggcacccccaggattcccagagagacgctgtgattggcaggaggcaggatatccccagggaaacccatcttcacgcctgggtgacccccactgccgcctccttcttaactctgcaggaaatcagagctggcagcctccagtgggaggacagagccggtttccgtggcaaccctcagctgcctcatcgtggctgggaagggaaggaagcaagccggcagaaatagctatggaaggtcttgcgcaggctgcaaccctggtgtgctgggcgaaaacccttatgactccccccttccaaatcaggctgggttgtcactgagactagattctcacctgccttcaaagaagggccaattccctttaaaggtcgcacctccttggaaccacagtcattagtgaattacactcaaggaaaagatgtgctcccaccaggcagctccagctgttacctgagatactgaagtgcagctcaggagacgattatttaaacctgcccttgttttaatcgttatttttctctttaaaaaaaatagaagctataaagaaaagagggagagatgagtgggttagctacctgctatgcgctagttaggaagttacctggatgccattgtatttcttcatcccttgcttaagaatcaaaattactggacatatgttaggaatactctttctttctttctttctttttaagctcagtggcaagaatgaaatactctttttttttttttttttttgagatggagtctcgctctgctgcccaggctagagtgcagtggcgtgatctcggctcactgcaagctctgcctcccgtgttcacaccattctcctgcctcagcctcctgagtagctgggactacaggcacccgccaccacacccggctaatttttggatttttagtagagatgggatttcaccgtattagccaggatggtcttgatctcctgagctcgtgatctgcccgcctcggcctcccaaagtgctgggattacaggtgtgagccaccgcgcccagccaagaataaaatactcttaagttgatctaatgaagtgtttccttaccattgtgattattgttactattatttgctatattttaatattgttgtttaccaaatattctcctttaaacagactcgctttttaaacttttttttttttttttgagacggagtttcacgcttattgcccaggctggagtgcaatggcacgatctcagctcaccacaacctccacctcctgggtttaagcaatgcttctgcctcagcttcccaagtagctgagattacaggcgcacaccaccacggccaactggtttttgtatttttagtagagacggggttcccccatgttggtcaggctggtctcgaaactcctgaccctcgtgatttgcctgcctggggcctcccaaagtgctaggattacaggcatgagccaccatgcccggcctaaactttgtttttaaaatgaactttttttccccccaattgctgccaatagtggataacatgtatcactcactgccaaaaatagaaagtgaccatgaaaaataaattcgctggggaagggggctccatgctggtgtggccaaggctgagagctctctcttctctgttacaaaacgagataagcaagtrttagaattgccttaaggccacactggcatctccctgaccttctccagggacagaagcaggagtaagtttctcatcccatgggcgaccagggccatctcctcccaccagtggcccccactcacagggagctggcaatgccctacctgcctgttctccagatggagaaacaggctctgagatttcacaggtcttgcccaaagtcattgattttaatgattaaaaagaataaacacagtgtttcctgagtagcagtgattgttatgccttgctattttaataaagattctattttcgtataacattgtcaagtggaaacatgctgaaatctattaaaccatctttgtttgtggaactgcctctgagtgtgattctgatggagggcattggccgtgcctggaatggtgaggtcagctcttgggacaggagagcacagagcatctactctgtcccttgctgtgggcccaggcctctcacagacagaactgagtcacacctttacccaccctccaaggcatagatgagtatccccgtttttacagagaaagaaactgagggtcagagaggtgaagtggtttgcccaagaacgtgtggctaagaggtaatagacctggaattcaaatgcaggaccctctgctgcctgagacagtgttcaggatctttctttcagtgatcctccggctggcagcagagggactgggtacccattagagcaggggtccacaacccctgggccacggatcagtataggtccttggcctattaagaaatgggctgcacaacaggaggtgaatggcgagtgagttagcaaagcttcatctacatttacagccactccccatcactcacattactgcctgagctccacctcctgtcagatcagtggcaccattagattctcataggagggcgaaccctattgtgaactgcacaggcgaggaatctaggtttcgcactccttatgagaatctaatgcctggtcatctatcactgtctcccatcacccccagatgggaccatctagctgaaggaaaacaagctcagggctcccwntgattctacattatggtgagttgtataattawctcactatttcaaacaatgtaataataatataaataaagtgcacaataaacgtaatgcacttgaaccatcctgaaaccatacctcccacccccacccctgggtcgctggaagaattgtcttctatgaaatcagtccctggtgccaaaaaggttggggactgccgcattagaggactttggggtagaccctggtaacaagcagacaacacaaaagctctctttaaaattcaccggatgctgtccatccttcaccagaatgcatgcattcatgttaaaataaaaaagaaggggtgaaatggattaaataagccttgggagaaataaaaagagaaatttggttttttctctcaaatctttgtatagaaataatatcccagggcagatgtgcctcacgtcagtttcctcatctgtgaggaggtcatggaggcacaacaggtgggatggggatttggcagtgagtgaaagacttccaaagtaacatagcaacatgttatatattaacatgctttcaatcaataccacaggtttttttttttttttttttttgagatggagtcttgctctgtctcccaggctggagtgcagtggtgagatctcagctcactgcaacctccgcctcccggattcaagggattctcctacctcagcctcctgagtagctgggattatgggcatgtgccactacacccagctaawttttgtatttttagtagagacggggtttcaccatgttggccaggctggtcttgaattcctgacctcaggtgatctgcccacctcggcctcccaaagtgctgggattacaggcatgagccaccatgcatggccacattttttttttctctttcaagnagatacgggaggccagaggtggtgtgacatctccacaatcatgaggttccctcctttctggaccctctagcatctgtaaccagtggtttccacctcaggggccgttatggctgcttaagctccagccattttgtccacattccacccagcaggaaagagggtgaagcaaagragagraaaacccctgcattcatccnattggtcagaamtcaatcacatgaccacagcttgctggacaracaggaggctgggaaatgtagtctttctcttcaggacatcagtatgtgccctcagaggggtaccataccccagtttgagaagtgctgcgttatgctctcttgtttaccagtcatggtctgaaccacatggcagggccagagggacagggcttggcttccctgagccgctgacctagcctttgttataacccrggtcctagtgatctgcagctcmaagactttggcctttcatacccttgtaccattaaagtcaacagaaagacccagtgttttattttgccaggtaaggacattaagaaatacatttactcctactgtcagcttatgaaaggatattttaatacccctaaagcagaaaggtaggttttatattggaattaacacaaccactcactcaaaagtctatattgaatagcccmaaaggtggaaacamwccagatgycccccacctgataangggataagccaawtgtgatgtacccccatyccaagggaataatatttgtcaataaaaaggaatcaagtactgacatatgctacaacacaaatgagccttgaaaatattatgctaagaggaaaaagccagtyacmaaaggccacttattataggactgratgtacatgraatgtccagrataggsaaatctatagagacatgragttggctagtggtttccagggatggtcgaggc

SEQ ID NO: 46 - DNA, 103747 bp, Homo sapiens
  Genbank Accession No. AL118525
tgtgtgtgatttggtagggagccaacttcattcattccctatagctggctagttttctgaaaactacctatgaaataacttgtcctttccccagctgatctgtgggccacctttgtcatatgaagcctcttgcactccccactctgctccattgggcttcttgtgcttatgtcactgtggtcctgtttttattagcatggctttatagtgagctttagtgcctgtagcccttgtctctcttctttgttcttttttagggcacacttggctatttgtggacctttaatcctctctacaaactttttagtaagtttgttatgggacagtttctcttcccttgcactcatttcctaatcctgatcaccagtttgccaccaaagcctacccacagctcctctacccagtgaaacccctgaggaatgttgccatggttaatactaagtgtcaacttgattggactgaaggatgcaaagtattgctcctgggtgtgactgtgagggtgttgccaaaggagattaacaattgagtcagtggactgggagaagcagacccaccctcagtgtgggtgggcaccatccaatcaaccaccagtgtggctgaaatagagcaggcagaagaaggtgggagaagctgacttgctgagtcttctggcctccatctttcttccatgctagatgcttcctgccctggaacatcggactccaagttctttggcttttggactcttgggcttacaccagtggctctcaggtgtttgcccacagactgaagcctgcactgtaagctactctacgtttgaggttttgggacttggactgagccactactggcttccttcctcttcaatttgcagacagcctgttgtgggacttcaccttgtgattgcgtgagtcaattctccttaataaactccctttcatatatacctctatcctattagttctgtccccctgaggaaccctgactaatacaaatgtggacagacaggtccctggaaagaaacctggggccaatcttccaatcagctggaaagccaaggaaagcaatttccctacaaaaatgagtgagacaggtattttgatgttattatgtttgtttgtttgtttgttaaacaaacgggatatgttacaatgtctggagatatttttgactgtcataactccaggggagagggagagtggttgtcctggcatctagtgggtagaggccagggatggtgccaagcaccatgcatggcccaggacagccccaactgtaaagaattctcctgccccaaatctcaacagtggcaagattgtgaaaccctgcatgagttagatggaaggcaaaggtgtttcccagtctggaaatgccattcttcaaccaaccattaataaacacctactatgtaccaagcattactcttgacactggagctacagtgtaaataaaatagacagtactgcgctcacggacttatattcttgtgggagatacagttaataatcaagtaaataagtcattctgcttgtgataaacgcaatgaaaaaaagtaaatggaagcgatagagcctaactgagagagacatcagcaactttagatagagtagtcagggaaggcttcctggaggaggcaatatgtctaagctgagaacctgtgggtaggaaaagccaaccatgtgaagttctgaggaaggaggtacaggcaagggaacagcacaagcaagggtcctaaggtgggaatgagcttgatgtgttctaagaacagatggatgccaagaccaagccatgcattgcccggttgggattttattctcaaggttaagggaggagtttgagttttttctaattgtgatgggaagccatggtagtgttttaagcaaagaagtcccatgcactgatatgttttgaggcgatggctccagctgctggtgtgcactatgaagtatttgaggataaaaaatggcggcaggaaaacccacgataagatttctccaattgtccagggcaaaggtaatgagatttggactcgatgatagtggcaaggatggctgggcagtttcacagccacaagtctctgatgggagactggtatctagtgggtgggggccggggatgctgctaaaccccatgcaatgctcggcacagccccccactataaagaattcttggccaggcatggtggctcatgcctgcaatcccagcactttgggaggctgaggtgggcaggtcatctgaggtcaggagtttgagactaacctggccaacatggtgaaaccctgtctctactaaaaatacaaatagccaggtgtggtggcgcatgcctgtagtcccagctattcaggaggctgaggcaggagaattccttgaacctgggaagtggaggctgcagtgaaccaagattgcgccactgcactccagtctgggtgacagagcaagactctgtctcaaaaaaaaaaaaaaaaaaaaaaaaaaaattccagcccaaatgtcaatagtggcaagattgagaaaccttagattaattaaatggaaagcaaaggtccccaagcccaaggccagtgctagatattccacatcactcagattcttccccactagtggcccgatatttacaaagtgtggctccagattcagataaagaacatctgggtatgcctggagcttgcaagtgcaggcagtgggaatggctctgtcacttttcagctaacagccctgttgtgactacttgtccatttatttactcaaccaggattcagtgcaaaatgactcagatggcagtgtgacctgtggctcagaggaaggattctggagtcagaatggtgctattacttacttgcagtgaccttgggcaagtgccctaacctctctgagcctcaattttctcatctgaaatacagggtggtaataaaaagagcacttgctttatagggttattataaggaatttgtagaaagcactcagtcatcaccagctctcattgtctggtaactgcaggttacctaagggcaggagctggtctgtcttgctcatctcatataacagaatgcttaaataatagagacttaaagaatacagatacttacttatctcacataaaaagttaagaggagggtggcatgaaagttgattcagcagctcaaccctgttattaaggacccaggtttcttccacccttttgttctgcctccctatgtgtatgggcttttcatgcccaggcttactgcctcattgctacaaaatggctgctgttatgccaggcatcaatcttcataaaatcatattcaaaggcaggaaggaggaggtgacaaggatggccaaaataactctcgcttctctcactctctctctctttttttgtaatcccgccacccactatcaacttcccctaccatctcattggccagaacagggtcatatagccacccctaggctgatcactagcaaagggaacaggattcaccccatagggtgagattattcctgtattaacaaaattcaagttcctttaataaggaagaaattaagacagaagttgggtgggcagccacagtgtccaccatactgttcaccagtggccagcacaatccctattacaaagtaacgtttgacaaatgtttttgaatgaataaataaaccctcttatttgagggcatataagaagcttatggaacagtttggaggtttctcaagaaactaaaaattgagctaccatatgacctagcaataccattgctggatatatacttcccaaaaagggaaattagtatatcaaagaaatatacactcttatatttattgcagcactgtttacaatggctaagatttggaagtaacctaagcatccatcaacagatgaatgaataaagacaatgtagtacatatacacaatggagtactattcagccataaaaaagaatgagatcctgtcatttgcaacaacatgggtggaactggagagcattatgttaagtgaaataagcaggtacagaaaggcaaacatcacatgttctcactcattggtgggatttaaacatcaaaacaattgaactcatggacagagagagtagaaggatggttgccagaggctgggaagggtagtgagggcttggggagggggaggtggggatggttaatggataaaaatatagaaagaatgaataagacctactatttgatagcacaagaggatgactatagtcaataataacttaagtgaacattttaaaataaagaatgcagttggattgtaactcaaaagccaaatgcttgaggggatggatgccctatcctccataatgtgctcatttcactttgcatgcctctatcaaaacatctcatgtactccataaatacatacacctactatgtacccacaaaaattaaaaataaaacaaatgaagaagcttatgaataagacacatctctgatctcaagggtatccagttctattcgttgggataaggtatacagaaataaattcgacaatgatctctcttattggcccctccccatctccaaggctttgatgaggaaaccccctgagatcatttaagatctcagtatctcaactgacatttgtatatatcttaaaaaaaaaaaaagaatggctattctgcaaaagttactggggggaaaaaaaaacaaaaaaaaaccagaaatggctggtacgtaagcagtgttccagccctctaggcaatctctattccaaatagcagagggcatgagctggtggactgtggacttgtgttgtttggccatgagagtattttttaaaattgtaatcaacagtgaaacatcagaagagtttacataaaatatggatttgcagcgtcacttgaaaaattaaaggatctgattaacactggaaccacattcttgcatggcatggcaattatggctgacacagagttgtggctgcccttgagtcacagctgctcctttaaagcaggacatgctctcctgtttgctacagtctccacctttccctaaagcccctcgctcaagtcatttctttttttttttttttttttttttttttttgagacggagtcttattctgtcacccaggctggagtgcagtggtgtgatctcagctcactgcaacctccacctcctgggctcaagtgattctcctgtcttatcctcccaagtagctgggattacaggcacatgccaccaagcctggctaattttgtatttttagtagagacagggttttaccatgttggtcaggctgttctcaaactcctgacctcaagtgatccaccctccttggtctcccaaagtgctgggattacaggcgtgagccactgtgcccggcctcactcttcttatttatgttacctgcatggtcctggtataaatgtgagtctgtgcttcttgcatgcaaaggccaagggactccaaagaggctatcttgcctctctctgtttccccagactctgcacagtgcatgatttagaattttcactttctgaatgaaaagactgtaagttatttgaaggcacatagccttcatttctaacaattttctgccatcataagaggagagactacctagaaataaagccattagaggggaaagttgggtgcccctggattttccagttatgtgagctcataaattctttttacctaagccaagttgagttgtcattgtgtcatctacatccaaaagagctcaactgatataatcctctttccactgacgagaaggttataatctacttttttttttctgagacaaggtttcactctgtcacccaggctggagtacagtgacatcatcacggctcactgcagccttgacctcctgggctcaagcaatcctcccacctcagcctcctgagtagctgggatcacaggcatacaccactatgcctggaaaatttttgtatttttataataatagagatgcagtttcaccatattgcccaggttggtcttaaactcctgggctcaagaaatctgctcacctcagcttcccaaagtgctgagattgcaggcatgagccactgcagttgtaatctacttgagccctatatatacttatatatacttataggaaacaaggcaaaaagagtaataaaaagcagaatattctatagagaagggacaccccatcccaatgagaacttaagtacaggtcagttgtggtggcacacatctgtaatcccaacactttgggaggccaaagtgggcggatggctgagcccactttttattaagccccgggcaatatggtgaaacaccatctctacaaaaaatcagaaattagtcaggtgtggtggtgtgcacctgtagtcccagctacgtggaaggctgaggtgggaggatcgcttgagcccaggaggctgagattgcagtgagcggagattgcaccactgtactcctgcctgggtgacagaacaagactctgtctcaaaaaaataaaaataaaataaaataaaataaaatatctcaagtacagccatctcatttaaagatagggaaataaaaagctgatttaggggaacaggatcccagtggtcagccagtgagtggggaggcaagtaccaacacccgagcacccaacttctaggccaaggccctctgaaaatgttttctgctcaatcctctctgcagacatcttctgctgagaagtgttcagatttttctcagaggctgagtgaggtcaagtcaacccaattcgtccatgtaaatacaagtgatataccctttaaaaggtgctggcaagagacgtgttcacttgaagtcaagcttttttctttctcttggactccataatacctgtcatcatttatttataatcccactgagtatcctacttaggttttttggcacatctgggcactgagcaaggctaattaatcccccttcccccatgaattcctgggtaagaataattgctttatgagggtggttataggggtacccgaagcctcaaggaaaatcattacatctctgagtggatgtcgctcaggacaacgggtctttgctgtggccctgcccagacaaagcaccagcagcctgagggatttttccatcagcttggactccagtcttctcacccatctctcttttgtcacaccccaaaataataatcataatcataattaaaaacaggataatggtggaatcttcctctcagggttgctgaaagaagtaaaaagataatgcaaataaagtgtttcacaccttgcctaaaagtagtaagtactcattaagggaagagtagtagcaatgctaacaatgacaatatcagctaacattgattgagcacttcctgtataccaggccctgttctaaatgctttgcatgcgtctgatctcatttaagattctttccagctctttcactctcaggctgaatattctgatataaacaagacctattaaatgttagatgatacttgagtgaacagatgtctgattctagtgcctgttctattttcccctagcctgattgtctttattaagccctgggtttcctggcccaagttcctggtaagtggatgaacttggttttcttttctttcttcattttcattttctaaattaaataaaatttgttttagagttggagtctatgttgcccaggctggccttgcactcttgggttcaaatggtcctcccacctctgcctctcaagtatctggaattataggcacatacccagtgtgcctgactgagcctggttttctgaccaacccaaacatttacccatctctccttcctttcttttgcctatcacctatccatcaacctaatcatcccctcatccatctatatactcagcaaccaaattattcaactacatacccacccatccatctacccactcactcatctattcgttcactcacccacttactcatccatctttctttccattcattcatatattctatccattatccatcttgctaccttctcatccacctacttatccatttatccatctatccacccatccgtacaccatctgtctttccactcatccatctatctgcccattcacccacccacacaactactccctcatccaccccaaatattcatgcatctatccaccactcactcgccagtcatccatccgtccacccttctaatctatccatgtatctatctgcccacccagccatctcaacccatctaccacctaacatttgcagtgatgctctgtgctaatccctagcttgttgttttgggctccctccctgggaggaaaggtgagtgccatcagagggtccccacagaggaagacagataaaccagtgagcctctttgtggcctggaccttcaaagccactgacttccagggtctgtggccaaacaatgatgaaatgcacatggaaaatgagaagccctgcaattacatggaaagagacagaggctcagccctcccaatgttacagctgaatgcagcattccaggcatccctaccaagccactccaccatagggtggagatggatggaggcacatgcttccagcagagcaattagaggtaaactaatatctctttcccacagaggagcctgggaactccaagacgcaatggaaaggaggcgagtcagcaaaaggaggaaatcaaagccacagagatcaagagctaattaactgatcctcctaagataatgtttcattaaaatccagttcttctgccctgtggggactgatatctctcctactgcctctccattgcccttttccacccattcctgatctcatctgcctccgctctgatctttccccaagtcttctccctcctccaatccaacctccccccagctactagggtagacttttaaaggcacaagtctgaccatgtcactccctatttataagtcttcaccactcattgcctgagacaaagggcaaactcccaagataaggcaaaggccgttcattcatttaacacagatttcctcagtgcctctcctctctcacaagcttggggatggtaggacacagaaacaagtttctgacccttgccctgtttctccagcttctttacccaccactcctttccacattcctgcatttcagcaaaaactttccaacctccggcttagtgatagccagtccctagggaaactgttgttagtatccatgctttgctcagctcacttccacattgactctgggcttggccttgtgacttgcatttaccagtggaatgtggtggcagtaatgccagttccaggcctaagccttgaaagggtcgggaagcttctgcttttgtgctcttgggagctctgaaccactgtgtaggcagccaggctaccctgctggaagggaccatgtggaaaaaccacatggaaagtgagaagccctgcaattacatggaaagagaccagaggctcagccctcccaatgttacagctgaatgcagccttccagccatacctaccaaggcaccaggcatatgaatgaagtcgtcgtggacgtcccagcctcacctaacatctgactgcagctgcatgagagacccccaagtgagagcagcagcagaaccatccaactataagccccattctctttctattagttcttatgagagctattcattctcatgagctttttagaaagtgccaacctggctgggcactgtggttcacgcctgtaatcccagcactttgggaggctaagattggtggatcacctgaggtcaggagtttgagaccagcctgaccaacatggtgaaaccccgtctctactaaaaaaattacaaaaattagccaagcgtgttggcaggcacctgtaattccagctactcaggaggctgaggcaggagaattgcttgaacccaggaggtggaggttgcagtgagccaagatcatgctgctagactccagcctgggcaacagagtgagattccatctcaaaacacaaaccaaaagcgccaatccacaaagacatgagaaataataaaatagttttgtgttaagtcactacatcttggagttgtttgttacacagcacgagatatctgatacagaggccttgctcctgctatttccacagcttagaatgtttctccaaccccagccatcttctttaccccacatggtgaactcctattcacctttcagagcccatattcagcatcaccttccctgcctcccatagtctgagttaatgtctctttcctctgggaaactgtatgagactaacctacaatacttatttttctgtttcttccgctggctatgaatgacaatatttactcatgtaatgctcacaagaaccctatgagggagacggtattattatccattatcctattttacaggtgaataagctggggcacagagaaatgcccccaaatcaccctggtattaagtggctcagcagagatttaagcccactcagaacccaagctcttgtccactgtggcttcttagtaaagtataaaaaaggtatgacatttattggtctcatttaacacaaaatccagaagtaggtgatgccaggacctgtctcagcaacagcctagctatctcagggtccttgtttgatttctgtgagagtctcttgtccacatcgtcacaaaacggctgccatgctcagcctctcacatgacaactcccagagagggaggaagaaggaacatctcccatatttcagaagctccccactgattttcccagccatctcattggtcagtactggatcacatgaccaccactagcccagttactggcaaggggaacctgatatccatgtttggcttggccctgtcttgatttggaggttgggcccattttcttgagcacaaggctgcctaatatctgaagaaagccagggtttcttctagtgaggaagttggccaatcaattagtgtctcttctgcagtggtcagctcttagaacacctgaaataaagtcacatacagaccctgttcatcccaaggatccagatgtcccaaaggtcaatctcccagatttgcataatgtgagttgtcttagtccatttgtgttgctataaaggaatacctaaggctgcataatttatagagaaaagaggcttatttggctcaatgttctgcaggctatacaagatgtggcactggcatctgcttctggtgagggcctcaggctgcttccactcatgctgaaaggggaagggcagcccgtgtgtgcagagacctcatggcaagagaggaagcaagaaagaggcaagggaggcaccggctcttttcaacaaccagctcttgcaggaactactagagtgagaactcacttcttaccatggggagggcaccaggcctttcatgagggatcaactcccatgacccaaacccctcccattagaccacacctccaacattgggaatcaaatttcaacatgaggtttgcaaaggtcaaacatcctaactatagcatgggtgcacctgccttgtctctcccaggccactgtgaagctccacggaaggtcctggggcaataagatagtacactgccagctcttccccaactcatcaccctcccatccttgcagacacacactctgaaccatgtctcaaatggccatgactcccaaatgccagaccaataacgtgtttgcattttcactggtccatcatgaaatgaatgagaaaaaacagggacaatggaatgagatttgtataaagctaaattgattccatttaaaggatgatggtgatttactttcctacttaaactctctcatggcttcccagggcacttagcataaagcccagcctcctcttcctgacaaggtctgctcccagagtggctcctgccaccccctcactcagccacagccttcctgggatgctctctttctccagcacaccaaaccccttgcctctttagagttctttggatttgtagtctctttctcctggaatgttcttcctctagttctttacaaagctgcgatctctcatcttgatctcaactcctatcgccacctgcctggagacttttcctgactgcctccaaggccacaggcacatccatctccgtgtcagcatccatcacctcctgctgtttgcttgtcctcagcatctgacactgtatttatgctgatttgtttctttactggatggcctctgctgcccaaatgtgaaatctatgagggcagagaccttgcccggactagtgcagtcccttcctccctggtctccagcttcccagccctcagcatgcacggtgagatggatcctcctagaatacaagttaaaccatggcccttctctgcccagagccttccgtggctgctggccacactgcctccctcctgctcctagaacctgccccagagcttcccatcttcacatttgccattgcatctctccagaacattctttcctcagatgccccagtggtttgctcctctcatttccatcgagtttctgttcaaagctcccccagggaggccattcctgctcactctctttcaaatctcacttcccatctcctgactcctttattcttctccaaagcacttatctccatttgaactgctttatattttacttatttgcctcatttcttacagtttctcccatgagaatgtcagcgccgtgaagacagggatatatcatttttttggtctgtgttactcactgccgggtcctgttgtctagaacagtgcctggtacaatgagaggtgctcaaaatatttacttaaaaagtgcataacagctttcttgaggtataattcatatatcataaaatttgcccacatgaccaggaacagcagctcacacctataatcttagcactttgcgaggctgaggagggaggatcatttgagcccaggagtttgagaccagcctgggcaacatggcaaaacccccctctatcaaaatatacaaaaacaaaaattagccaggcaggcatggtggctcaggcctgtagtcccagctactcaggaggctgaggtgggaggatagctagagcctgagaggcagaggttgcagtgagctgaaatcacaccactgcactccagcctgggtgacaaagtgtgacccctgtctcaaaaaaaaaaaaaaaaattgcccatttactagtacattcacagaatttcacaaccatcacagtgatccattttagtaggtttcattagtggtcactccctacttctccctatttccccatccctggaaaccactagccaacttcatgtctctatagatttgcctattctggacatttcatgtacattcagtcctataataagtggccttttgtgactggcttttttctcttagcataatattttcaaggctcatttgtgttgtagcatatgtcagtacttgattcctttttattgacaaatattattccattggaatgggggatacatcacattttgcttatccatttatcagttggtggacatctggattgtttccaccttttgggctattcaatatagacttttgagtgagtggttgtgttaattccaatataaaacctacctttctgctttaggggtattaaaatatcctttcataagctgacagtaggagtaaatgtatttcttaatgtccttacctggcaaaataaaacactgggtctttctgttgactttaatggtacaagggtatgaaaggccaaagtcttggagctgcagatcactaggacctgggttataacaaaggctaggtcagcggctcagggaagccaagccctgtccctctggccctgccatgtggttcagaccatgactggtaaacaagagagcataacgcagcacttctcaaactggggtatggtacccctctgagggcacatactgatgtcctgaagagaaagactacatttcccagcctcctgtctgtccagcaagctgtggtcatgtgattgagttctgaccaatgggatgaatgcaggggtttttctcttctttgcttcaccctctttcctgctgggtggaatgtggacaaaatggctggagcttaagcagccataacggcccctgaggtggaaaccactggttacagatgctagagggtccagaaaggagggaacctcatgattgtggagatgtcacaccacctctggcctcccgtatctgcttgaaagagaaaaaaaaaatgtggccatgcatggtggctcatgcctgtaatcccagcactttgggaggccgaggtgggcagatcacctgaggtcaggaattcaagaccagcctggccaacatggtgaaaccccgtctctactaaaaatacaaaaattagctgggtgtagtggcacatgcccataatcccagctactcaggaggctgaggtaggagaatcccttgaatccgggaggcggaggttgcagtgagctgagatctcaccactgcactccagcctgggagacagagcaagactccatctcaaaaaaaaaaaaaaaaaaaaacctgtggtattgaatgaaagcatgttaatatataacatgttgctatgttactttgagaagtctgtcactcactgccaaatcccatcccacctgatgtgcctccatgacctcctcacagatgaggaaactgacgtgaggcacatctgccctgggatattatttctatacaaagatttgagagaaaaaaccaaatttctctttttatttctcccaaggcttatttaatccatttcaccccttcttttttattttaacatgaatgcatgcattctggtgaaggatggacagcatccggtgaattttaaagagagcttttgtgttgtctgcttgttaccagggtctaccccaaagtcctctaatgcggcagtccccaacctttttggcaccagggactgatttcatagaagacaattcttccagcgacccaggggtgggggtgggaggtatggtttcaggatggttcaagtgcattacgtttattgtgcactttatttatattattattacattgtttgaaatagtgagataattatacaactcaccataatgtagaatcagtgggagccctgagcttgttttccttcagctagatggtcccatctgggggtgatgggagacagtgatagatgaccaggcattagattctcataaggagtgcgaaacctagattcctcgcctgtgcagttcacaatagggttcgccctcctatgagaatctaatggtgccactgatctgacaggaggtggagctcaggcagtaatgtgagtgatggggagtggctgtaaatgtagatgaagctttgctcactcactcgccattcacctcctgttgtgcagcccatttcttaataggccaaggacctatactgatccgtggcccaggggttgtggacccctgctctaatgggtacccagtccctctgctgccagccggaggatcactgaaagaaagatcctgaacactgtctcaggcagcagagggtcctgcatttgaattccaggtctattacctcttagccacacgttctcgggcaaaccacttcacctctctgaccctcagtttctttctctgtaaaaacggggatactcatctatgccttggagggtgggtaaaggtgtgactcagttctgtctgtgagaggcctgggcccacagcaagggacagagtagatgctctgtgctctcctgtcccaagagctgacctcaccattccaggcacggccaatgccctccatcagaatcacactcagaggcagttccacaaacaaagatggtttaatagatttcagcatgtttccacttgacaatgttatacgaaaatagaatctttattaaaatagcaaggcataacaatcactgctactcaggaaacactgtgtttattctttttaatcatcaaaatcaatgactttgggcaagacctgtgaaatctcagagcctgtttctccatctggagaacaggcaggtagggcattgccagctccctgtgagtgggggccactggtgggaggagatggccctggtcgcccatgggatgagaaacttactcctgcttctgtccctggagaaggtcagggagatgccagtgtggccttaaggcaattctaacacttgcttatctcgttttgtaacagagaagagagagctctcagccttggccacaccagcatggagcccccttccccagcgaatttatttttcatggtcactttctatttttggcagtgagtgatacatgttatccactattggcagcaattggggggaaaaaaagttcattttaaaaacaaagtttaggccgggcatggtggctcatgcctgtaatcctagcactttgggaggcccaggcaggcaaatcacgaggtcaggagttcgagaccagcctgaccaacatggggaaaccccgtctctactaaaaatacaaaaatcagttgggcgtggtggtgtgcgcctgtaatctcagctacttgggaagctgaggcagaagcattgcttaaacccaggaggtggaggttgtggtgagctgagatcgtgccattgcactccagcctgggcaataagcgtgaaactccgtctcaaaaaaaaaaaaaaaagtttaaaaagcgagtctgtttaaaggagaatatttggtaaacaacaatattaaaatatagcaaataatagtaacaataatcacaatggtaaggaaacacttcattagatcaacttaagagtattttattcttggctgggcgcggtggctcacacctgtaatcccagcactttgggaggccgaggcgggcagatcacgagctcaggagatcaagaccatcctggctaatacggtgaaatcccatctctactaaaaatccaaaaattagccgggtgtggtggcgggtgcctgtagtcccagctactcaggaggctgaggcaggagaatggtgtgaacacgggaggcagagcttgcagtgagccgagatcacgccactgcactctagcctgggcagcagagcgagactccatctcaaaaaaaaaaaaaaaaaaagagtatttcattcttgccactgagcttaaaaagaaagaaagaaagaaagagtattcctaacatatgtccagtaattttgattcttaagcaagggatgaagaaatacaatggcatccaggtaacttcctaactagcgcatagcaggtagctaacccactcatctctccctcttttctttatagcttctattttttttaaagagaaaaataacgattaaaacaagggcaggtttaaataatcgtctcctgagctgcacttcagtatctcaggtaacagctggagctgcctggtgggagcacatcttttccttgagtgtaattcactaatgactgtggttccaaggaggtgcgacctttaaagggaattggcccttctttgaaggcaggtgagaatctagtctcagtgacaacccagcctgatttggaaggggggagtcataagggttttcgcccagcacaccagggttgcagcctgcgcaagaccttccatagctatttctgccggcttgcttccttcccttcccagccacgatgaggcagctgagggttgccacggaaaccggctctgtcctcccactggaggctgccagctctgatttcctgcagagttaagaaggaggcggcagtgggggtcacccaggcgtgaagatgggtttccctggggatatcctgcctcctgccaatcacagcgtctctctgggaatcctgggggtgcctggaggctgaggcccagggaagcccccaaaccccagtgctgctctgagaagagactagcctctgggacattcagaggtctggggttcttttatctccctccagctaaagctagagggacctcattatgtgtcttacaagatgtacccaagtttaggtgcctctggctctgtcagctcctgaagtcgagaagaattgtcccatcaccagtccccttgagcccaaagaacaggagttgctcatccagcatttgctcctgggacagtaaatctgcctgcagagttctacagcttatgagctatgtggccccaggcaagtcacctcacctctcagttttctcatctatgaagtgggcacaaccctccttctcttcatagagatgctgtgaggagtagacatactgtctgtagggtctctcgcaggcatttaaagggtctcaataaacaggactttatattaataaaaatagcatcataaaaaaggtttgcaggccatttttctctttaagctgttttttattttaattaattatttatttattgagacagagtcttgctctgtcgcccaggctggagtgccgtggcgcagtctcagttcactgcaacctccacctcctgggttcaagcaattctggtgcctcagcctcctgaatagctgggattacaggcacgcaccgccacacctgactaatttttttatgtttagtagagacggggtttcgccatgttggccaggctggtcttgaactcccgacctcaagtgatccgcccacctcggcctcccaaagtgctgggattacaggcaagccggggcaaaggcaaattttcatcactgatacatttgttcaaagggtggtgcactcaggctgggttggaccaattagctggtccccaccacctcttacaatgtcacttctaagagttagaacagggtctcacactcagatgccttcaggtccaggaggcgctgtgaatgcagaagcagacccggtcagaaccctggtgaagccgagagcacatgtcctgcataagggaggcggctgccactcagctctggccaagagttacccttgggaatgtgagcccagtgtggccagatataccaagttttcaagagaagctggacattttgaatgaactctcccaaagatgataacaactaaggcatttttttaagtgaagtccaaacaaaacacgtctgcagactggatcgtgatcacagttggggcttctgcactagaatgcatgaaatcggcaccttcttttttggcttgatcagtctaaggagtcctggctggctccttccagccatcttgtctgggctgtgtcttccttagctccctacctgagtgctgacactgagaaagcccatcccatctggtgcctgtcactctagaacagagaactccactcctcagagcccagtgtttggagggtgcccctgttctgcaccgggaatgcatcagccttgggggaagctctcctgcattttctcaagtagtgtgagcaatggggcaatctggcaaatggggccccagggaagcagatcttctaagggactcctttggttttagctagtttaaggattattgggggactgactgctgaatgacatcaatggacacaaaggacatcctgagtggcctttctgtggccagcatccgctttgactggataaggcccgggccatgctagctcataagaactaggaaggtgacacctccgggagttgggggcagagcagtgaagactcctagttctgccttatctgaatagcatttgtggatatcacgaggtgagagtaacgaggtgaattgggagcagacaaagcctgattttggaaagaaaactttgcagtggataatccatagagctttcaatgtcttttctttgttcaccctcttagcttttccctcccctggacccagccttctgggagaaaagcagggaagtggtaatgctagcacctgcacccgggccaactgtgcacacagaaagctgggaggctggggcaggctggggcaggctgggcagaggcgagcacgtggatccatctgctccctgtgtcatgggcggatgcggtagcggacgggcacgtcgtgttccggctgcatcagaccgaagccgtacctgctgaggtcaaactcagggatctccacatctgcgttgatcagctccaagtccaagtgcaccagcacaaggaacacaaatctgcagagagatggcatggaaggtgtgaaggagaggagtagggcagggggttatcgggaacaaggcaggggagccatggctgcctcctaagtctgactccaactttgagtaaagtgaggagaggagtgaggaagtagaagaaacgcatttgctgctcaccacatttgccagccccctgtaaggttaggcaggcccgtggatgagttctggtgaatgggctgtgtgcagaagtggcctgtgtcactcctgtgtcaaagcattcgcgagccagtgtgtggctctccagctgtccctcctgcctggcagccatgcaggcttcacattgagacggtggagccgaaagagggaaagagcctggcccgagtctgtgcacagagtggggaagccctccaatcccacagctgataccgtgtgagtggaactacacctctgttggtaaaagccactgagactcggcaggtgcagagctgagcctgtgctgattaatacggcgactcctctggatcctccagcccacacactttgccgcctttccccacactcctggaaccctcactgtctatcttggccaggactgctgctaacccttaggtgtctttgtgagattagaaacaggcatcgctctcaagacattttactgccatctctgagaaaattgtcctaaatagaccaactttgcaagaacaagcactctctactgccatcttctgggaaaactgtcataataactattcgcagctgccatgcctatgatgtaatcagtgcccccataaatgtggaggcagccctacgggggatgtcaacggttgctgcctccctgcctcatcttaccaatgcccatgttcgtaagggtcaggagaatatcttatgactcttttcccaccactattccctaccccaacccaggcgcccgatgcagcactgagcacatggtggggattcttttgtctcactgaaggagtgaagaagagggcagatgaggagagaggggagttaacactctggacagatctgggctgtgccgcttatgggaatgtggccctcgccaagttcttacccactctgggtctcagttctcccatctggtcaaagaggggaaaggcatgttgagtctcttccagctctgaggctgtaggaaactagagggtgagtttctaagggatggcggttttgtgcccacccctggatttgaactcctgcacctccacttcctgggaacacggcaaatgatctgacctgcctagactcggttttagatggaccagcagggttgtcatgacaattcagtgagataaaaataacaacaaattagctaatttattggaacactgtgcgctaggcaccatctaagcatttagtacccgctatctctttttatctgtccaaaaacttgatgaggtaggaatgccagtcggttctgctctaacacttgttttgaacaggtgaatttgttccaataggattgatatattagggcaccatttgaatataatgcaagtttcacatttgctcacgtgcaatttcacttgtgagaaacatgaggtgaagacgaaagactgcacccagctgaacctgggtgtgcagaaatccataaaatatacacatgcacacaactaagcatcgatctacagccacagttattacagcacttacatagttcttagccaggtaacatgtataaaactttactaccattttttttactgggttcttctctctctctcttttttttttattatgtcactgatgaggtttttgagtgttggccccagtcccccttttccctcaatccctgcagttttttctttctttctttcttttttttttttttttttttttctggagacagagtctcactctgtcgcccaggctggagtgcaacggcgcaatcttggctcactgcaatctccacctcctgggttcaagagattctcctgcctcagcctcctgagtagttgggattacaggcacgctccaccacacccggccaatttttgtatttttagtagagacggggtttcaccatgttggctaggctggtctccaactcctggcctcaaatgatctgcccacctcggcctcccaaagtgctgggattacaggcgtgaatccctgcagtttttgttgcatgatttcacacagcaaggtgattttaaggaatgcatatgagctgtattatgttcataattgactccattttcttgaggaaactgaggctaaaggtttatgtaacgtgcccactcacttagcacaatgcatgcacaataatgatattaacaattatggtaataattaacatttttcaaatgcctacaatgagccagacagtgggttaagaacttagaaagatccaattcatttatcctgacactcctggggtatagttataatcagaaccctcattttacagttgaggaaacaggctcagaaggtaacccagcttatgattgcacaggggctggacaggaggacagggcagatgtcataacccctggtccaatctgtttgtgatcctggtggccaaagctcctggggttcaagggagataatttatgaggctctcggccccacaggtattaaaataaccaagtgggaacagtgaagttcggccagttcctaacatgaagttctgaacatgcggcagcagctgcagacgggtagctacggtcagctgaaaggaatgtccagtatttggaatctggacaccagtcttggagggaagaacctgctgccagatctgattatttcaaaagaaatccgaaatctggcttttttacacgagctcttctgatttataaaagcacacagttgtaaaaccacaaataagagatggctcacgggctgtccatgtgaagcctctgccaaaccattctcctggctgagccctcagtcccaggagagaagggcgcctgccaaccaggggatcaggagccaccctggccctgccctggccccccactcactgtttgatgctgttgaccgcataactcctccccaggcagtgattgtgccccgccccccagggcatgttgtaattcttcagccgtttcccatccttgtaaaagtctttcttctctgatccgtcagggttcaggaatcggttgtatttaaatacctgaaataggaagaaggtccttttctgaccccattcccagaacaagctcacaccaagaaaaatgtatgaggatgttcatgacagtcatgtttataagagggaaaaactggaaaccatatacaggtcaattgataggggattggttaaaaaattatggcaaaaggtttgtgtgtactgacatggaaagaatttctacaattggttgttgagtgaaaaaagcaagtttcagaatagtatatattgcatgatcctatacacacaccaatcttttcatggcatgtgaatgtgttgtgtgtatgcctgtaaagccatgaaaacaattcgcaaggcacactccaaaccttggtcagagaactctgtagaactggagaagaagggaaatacatattttttacatttaagtatatatttctctgtatttctttatattctatgatatatattacttttgtaatgtaaaataaaagaaattaaaatattttttaaaaagaaaatgccaatttcctttggttacactgcacagtggtaaggcaagggttgtagctgagcacagagcttggcatggagtagctgccgactgaaagatgggtggaaggataggtgaatgaaccagtggatagactaagagatggaaatgtggatggaaagatggatgaatggagggatggatagatggatggatgggtagatggggtggatggatggatgggtagatgggtgaatgaatgggtagattgatgggtggatggatgaataaatggatgaatggacaaatggatggatggatgagtagatgggtggatagatggatggatgggtggataagtagaagaatgggtggatggacatatgagtgagtgggtagataaatgagtgggtggatggatggataaatgagtagatgattgaatggacagacggatggatagatggatggattcatgggtaggtgggtggatgaaagagtagcttcatgggtggatggatggatggatgggtggatggatagattaatggatgggtagatgggtgagtatgtggatggatggatggatgcatggatgcatgggtggatggatagattaatggatggatgggtgaatttgtgaatggatgaatggacagatggatgcatgggtagatgagtggatggatggatagatgagtggatgggtggctggatggataaatgaatgggtagatgggtggatgaaagggtaaattggtgggtggatggatgaatggatgggcggatggatagatgaatggataggtagataagtgagtgtgtggatggatggatgaatacatgaatagacagatgcatgagtagatgggcagatgaatgaatggatggatagatgagcatgtagtttagggtctgacacacagtaaacacccaatctgttagcaattgtgaaagtttacttcttctcaaagtctggggcaaggcaaaagtgttgagaaactgacattataacaatctgaaataaggaaaatggctgagctatcacaaagcactcagtgtgaatgaacatcccctcatgttctagggttcctcagagacccttgaacatgaggggatctgggtctgactccaagagaagctgtgaaaaaaggtaggagccaaagagatatcagaaggctggggagagagtggggccatcaatatctgcttatgcatgatcccatttaatcttcctatcaatctcatgaggcaggtgctattatgaggtccatttcacaggtgaggaagcaaacacagagaggtgaagcaatctgggcaatgtcacatagcaaacaaagagcagagccaggctgccactcagatctggctcatcccaaagtcactgattgttctcccacagaccccatatgaccaggcgcccctgccatttacctctgggtctgtgtagatttctgggtctctctgggggctcaggaaggggaagaggaggaggcggtcaccacgtcgcaggttgaattctcgcccgtctgccatgggcatggccaggtccaccacaacctcgcgggtgatgaagggggcagctgtaagcctgaggctctcactcagcacgctatctgcatggggcaggtgcaaggaagagtcagcgggctatcccttcacctgctcatatgccaaccccagctcttattttacagaggaagatgaagaggctcagagagggtgcctgcctcgcccacacagtcacatagcaaggtgaaaaaggacacacgatgacatgtggtctctgtggtccctcagagacgtttgaacatgagggtatccaggtctgaccccaagagaagttgtgagggaaggtgggagctagggagatatcagaaggctggggagagagtagggccatcaatctctgttcctgtctgcccggcatatatttctcttctggaaacgggcccctgattttcctctagggtccacccctctctcattctcaggggttagactgctgcttctatgctcaactcctgggatggggctgtgactggccaatcagagcatccctctgagccctgtgattggttcaggatggacacatgacccaaagaaagccaatgagacacagtcttgggactcttggtgggaacactgtaagagattcagagtctcacagagccaggaggaagtcagccttgagctgccaacagctactgccagcctgagactggagccaacccagtgggaaacagggctgagaggtggagaggaactgagtagtcctgacgacattgttaaagtgcatggatccacctgtgcctgaagccaatcctctgggctttttagtgacatgtctcaaagtaccttttcaccttagtcaattgaagttaggttttctgtcacttgacccctagctgaggctggagtatggagatgccaggtgtgtgaagataggaggcttagggagaccctaggtcggaggacacactgatggaccctggaagacaggagtccatgttggggagggctttgggggtccatgatgacgcagtcttaggggctatcttggagggtctgacgatctcaccaagcacaggtgtgctgtctagaaccttctgtgggagagtggtcgtctgcgagacaggctgctccgcttgccaaaggatactctcgagctctccgcggacagcagccagggcttcaggattcttgagaaggaagagcaggagccagaaggcagcgggacccatattcccctgcaaggagaagggcccctgttatgccattatgagggcagagctgactcgtctctgccagggacacagctcgggccaagacagaggggccagtaggcctgggttcccactgctgccaaacacccaggcatgaccagtgtctatctccagcctcaggacatggccaaaactgccctgtggcccaaaatacctacttcaaggccactcgtggcatccctgactgtgtgcaaagtcactaatcctaggtcacacaggtaatcttcatagctaatcagcaaaacagtgtcagtaataggaacagggtatatcagttaagactgttcacatctgagaatgatcacattgttggccccaattcttccccaatcgcagaatccacgctccttaccatgtgaatttgctgttcctcctattcaagagccagagcgtatttcccctgccctttgaatttatgctcagccgtggacttgctttggccaatagattgaggtggaattgaaggaacagccactctacgcctaagccgcgagagactttgtgtttccacttgctcggcaagcccactgatcccaagaggaggatgagagactcatggacagagctgagctgccccaatgagccagacccacagacccgtgagttaaataaatgctgatgggtgtatgccgctgatgagttgttatggatgtttgttatgcaacaatagctaactggtgtgatatctaaagatttgcttccaaatataatcattcttgatgtagtttgggaagcaaaaagttccctatatgctttgtatcttcaaattctatcagtcacttgaagaataaatgtgtgtgtgttgtgtacgtataaaacaaagccgcaatcatcattgatgactgaaagctatgaataaaaattatttaaacttcccaatagataaacacttaggaaaacgagtggaatttcttgcttcaaggcttcagtcttagctgaacattttcatacacattttagcctcagctctttggtatgtggctaaaatgtgtatatggcaccctttagtgatccagatatgggaagaataccaactaatctcaatttgggggaaggtttttgtctgccgtgactattctattcaatcataataatggaatattaaatcatcattaaatatcatgtttacccactaatttcattacagacataattacacatgggcaaaaggacatatgcacaaagataattattgcagtgctcatgtaatagaaaaatgctggaaacaatctcatgtctatcaataagagatcaatgagatcaatgaagatccatccattggatgatgtgatgcaggaagtcattaaaaagaagctggctctgtgtgtaccgatgtgggactgtagccaagacacacagaagcatgcaaacgcaaggtgcagggtggtggctcagcatgctgccatttgtgtgtttgtttaaagagaaatatacatgaagaagtacagaccatctctttttttttttgagacagggtcttgctctgtcacccagggtggaatgcagtggcacaatcatagctcactgcagcctcgacctcctaggctcaagtgatccttctgccttagcctcccaaggagctggggccacaggcatgtgctacccagctaggttttttttttttttttggtagagatggaggtctccctatgtttcccaggctgatctcaaactcctggcctcgagcagtcctcctgccacagcctcccaaagaagcacagaccatctctaagagacaccagaaacgggtaactgaggttaccttgggacagaagctgggaagacaagaggataaggaggaaggaggctgactttccttgcaaataccttttaaactgttcaaaattttttaatggacacactaattttaagtgaaacagaagccacccaggctggagtgcaatggcacgatcgtggctcactgcaacctccacctcctgggctcaagtgatcctcctacttcagcctcccaagtagctgatacaagcatgcaccaccatgcccggctaatctttctattttttgtaaagatgaggtctcactatgtttcccaggctgtatccaaatcatttctacagtgatgtacaatgtcatgagagatgctcatgttacaatattaaaccaaatagaaggttagattaaaacagctgcatgatcttaaccacagaagaaaaacctatggggaaaggctggaaagaaatgcaccatagcattagtgatggtgagatagattttgccttcctctttagtgcccgtgaggccaggaggaaccacactcctctgctcaatacttccatcacgcaggtgccattattaggccttttactgaaaaggaaaacgaagtactccccggtcactacccactgcccagcatatagtggaggctcactgatatttgtcaaataaacatctgcatccctttggattagaggtggagctccaagacagcctgggaggtgggctagaagatccctggactgagaccaggtagaggtgggttcaaatcccagctccccactttctgtgactgtggacaagtcacgtccccctttgggtctcaacactgggggtaacattgccacctcctgggtggacgcaagggtccagtgaggctgaatgcaagcaatcccacacgtgctgcgcccatagtaggtgctcagaagtggttactcctcccccactggcccctcccctggatttgaaaacaagtcgggggggcctccggccctttctgagagttccaccagcacctcaggtccagctgacacagcaaggtcacctgctgtccatcacttaaatagccaggcaaatgcggatgataaataattcaacaccagcttagctcagcgccaaggccattttatctggcccagatggttagatgggggccaccgctcattaattaccaagcaggagtggaacacatgggcgcttggctatctctgcctgcaggaaaaagctgtggcaagttagggaggtgaccaagaccgccttttacccaactgcacagatgtgagtgtgagtgtgtgtgtgtgtgtgtgtgtgtgcacacacaaccataagagatcctgaatttgccaccctggaatttgagctttcacccacggagccttgcctccgtttactcaggaagacacttcttgtttgtcttcattccctcctactgcagccaaaggccatgacccaaaagcagtgccacccctgttctagctttcctgtgaatggcagtggctgacctctgggaggcactgactgcgggccagaccacacccttggtgattcacatgctccttcttgttgcctcctgacaacatggcccatcagtggaagtgggggacttccgctgcccgctcctgcctgcatccgcttccttgtcgttggtaacagcaccccactttccttcaaagaaccacctcctcttaagtctaagtccatgtgggccatccaggactgacccatccttccagacttcaagtgtgggcatgggacccaggcggaggcactgagtgatccacgcagagtggggcatatgacgtgggctgggccagtgagtatcagtcttgggagctgtgctagaatttaggggaagggaagccctcctccatgggattgctaaattgcctagagctactggaggccattgtagtcatcccccagggggagaccctctgaggatgtagcctggcagaagaagggagacctgagggatgggggtcacagattgtgtttcttttaatttttatgatttagaagattccaacggaataaaagaatatcccgagtgtgatgatgtgttagtgtaggtcataaattgtaacaaatgtgccactctgctgagggacaccagcgatggagaggcgaggcattgggagaagggggctaagggagatccctgcacctttccttcaattttgttgtgaacctaaatctgctgtaaaaatagagtctatttaaaacaaacaaacaaaagccctaagtgcaatgtgggattgtggattggctcctggaagagaaaaagaatattagtagaaaaactggggcaatgtgaataaagtatagactttagttactagcaatgtcccaatgtgaatttcttagtcttgatgaatgtattgtggttatgtaacattagggaaagctgggtgaagggtatttgggaactcctgtactatctttgcaactcttttataatctaaaattatttcaagataaaactactgaagacaaaaaaaaaaacaaacaaaaaaaccaaccctctttacagatggtgaaacttaagcccagaaaagtgacttgtttgaggtcacataactagtttagtggcagaggtgagattccacccgagtctgtctgactctcaatactgtggttttgctttctactccgttgtcagatgcctcaaggattcttctcgatgatcactatctcagcggagctatgtgcaggcccagcagctcccgtggccccctcccctacctctcaggaccacccaggaatttccagggatgtgtggctgtggctgctgaggatgtgatggggtgaaggccaagccagatatcgggaaggaagagaaggatcagatgtgatggatggggctgagggacatcatgtcaatcaatggtttcagtcctggcattaccagcatcagtgggctcagagctggcagggaagcctgacctgtgtttggaaactctcctccgtctgccccccaccaccccaccccaccttcccttacagcctcctcttccccttgcctggaccttaggtctcggcccacagagtcctccctggatgcctgagactcccactgctccttccatcactctcgattccaggttcaggggttctggattcaggaagctgttgtgaggatcctatgagatggtggttgcaaagtgctcaacaggatgcttggcccagggtaagtgctcagtatcttttgagattattattcctgactcatcatctccgacctgacagcagcaatcacagctaccatttttcagcctctctgcagcatctgacccagcttcccactcccggctctcctcccaccttcctggcccctcctcctcacccttcccaccactggagagccccagggatgcccccttcttcacccaccctcgcctgcagtatctcctccagtcctgaggatttaaactcctctatgctgacaactcccaagcctggacctcaaacttgaactccagactctcttctccaggtgtccactcccccatctccatctcaaattcaacatacccaaagcccaacccccgatcttctccctgaaacttcctcctcccgccatctccctcttctgcccatggctctgccatccctcctgtcactcaggcccaaacctggattcatccttgatggcctcccccaaggtcccatccaacagcggatcctgttggctttactttgatatatgttcagaatctaaccacccctgaccctggcccagcagcaccctctcttgtctggatcctgctgctcctctctgctctccctgcctctgcttccccaccccctacagtctcttgtcagcgctgcagccagaatgatccctctaaagcgaaagacaggccaggttcttcctctgctcagagccctacagcaggcacctgtctcactcacagtaaaagccaaagccctccccatggcctacagggacctgtgtggtccggcagctctgcctccccaccgtgtcacccttagtcctgcctcagggcctttgcacttgctgctccctgcctgggaaacttcattctatatatttacatggttcacccctcacttccttcagtctctgctcagatgtcacctttcagtgaggccttcctgggcctgccttcctgctgcatctcttctccatagaacacattccctctaatacttttttttttttttgagatgggagtctcactctgttgcccaggctggagtgcagtggtgccatctcggctcactgcaacctccacctcccgggttcaagtgattctcatgtctcagcctcctgagtagctgggattacgggcctgtgcgaccatgcctggctaatttttgtatttttagtagagtcagggtttcatcatgttggccaggctggtctcaaactcctgatctcaagttatctgcctgccttggcctctcaaagtgctgggattacaggcgtgagccactgcgcctgacttctaatacattttagatgcttacttgtttgtttatttatttatttatttttgagacagggtctcactatgtcacccaagctggagtgcagtggcacaatcatggctcattgcagccttgacctcctaggctcaagcaatgctcttgcctcagcctcccaagtagctgggactacaggtgcgcaccatcacgcccagcttttctacaaaaaaaataaggtagtttttgcagagatggggtcttgctatgttgcccaggctggtcttgaactctaggactcaaatgatgttcctctctaacttcccaaagcactgtgatgacagcttatgtgtttattaattgtctatcttctcccaccagaatgccagctccctaagggcagggatttttgtctgttttgctcaccgctctatccccagcttctagaatggggcctggcccatggtaggtgctctaaatatttgttgaagatgtttcttgagcacttgttatctgcaaggcacagttacaaaattgcacatgtattcctgcctcctttcatcttcacaaccacgtcttgaaacgggtgctaccatctccattttacagatgagtaaaccgaggtgctcagaggttaagtgactgacttgccaggaagtgtcaaaatcaggattcaaactcaggctgggaggtcacagagcctgtgccagaaactcctaggccaagtaccctcttggctccactcccaaaaggcccttgaaaagttttcccacctgcctgaattctggacgctgtcaacgactcaacctcagaggacatcttgtccccagctcctgcccagctctcctggccctgccaaaggctgttccctggactttctgccactcaaacccctcagccagcatccagttttgctgacaccagtcattcccacgagagttctggagacactttggagctccaagtcatctctgcacataaatatgttattaggcactgatgtgggggacaactgccaattgatcccagtccccaccccttgccagtctctgcctgcaaggacagttaatggctctgaggaaactaaaaataagctgcaagtcgatgggagaggaattacccagaaatgtcagcttgtgcaactgtcaccgtcgaagtggggccaagagaaagatggggcttggggatcaggagagagggcaggaaccaggcctggagctgtgcagcatggaaggctaccatctttctctcactccaatatctggtccatgaccaagtccactgactctgtcttcctgaaatttccaaaatctatccacgtcctcatcacctccatggccaccacctgaccctgccaccacagtttcctccttgttgccctgtttttgcttttgcccccaagatcctgtccctcctctgctcagaactctcccaggcccccatctcgcccagagaaaaatcccaagtcctcatttatgaggacccacaaggccctcagtgacctcttccctcggtctcacgccccctccctcactctgcttcagctgtgtgatccaactctactctgcaagatccaaccccagggcctttgcacttgctgtttcccttatttggaatcttctatccccatatcttctccaagtctctgaatctagctttcttatcatccagggctcatctcaaatatctcagggaggcctccctgaccaccccagctagagcagacccgaaagtctctctattcacagccctgtttcatactctacatatcatcatctaaaatcaccttgtatatgtttccttgactctctgccccctgtcctcctgaccccccaaatggtaatcgacacaacacagaatctttgaggtctacggtaagtactcaaaggattttttttaagaggtggaatctcactatgttgcccaggctggtctcaaactcctgggctcaagcaatcctcttgcctcaccctcctgactagctgggactacaggtgcacactaccatgcccagtgtctcaatggaacttctaaacaattcttcaaaataactggtctgcacacttcaaaaaatgtaaatgtaatgagaaacaatgaaacgcacagaaaccgtgccagattaaagaaaatgggtcgggtgcagtggctcatgcctgtaatctcagcaccttgggaggctgaggctggtggatcacgaggttaaaagatcaaaaccatcctggccaacatggtgaactcccatctgtactaaaaatacaaaaaattagctggacgtggtggcatgcgcctgtagtcccagctattcaggaggctgaggcaggagaatcgcttgaactcagcaggcagaggttgccgtgagccgagattatgccactgcactccagcctggcgacagagcaagactccatctcaaaaaaataaaaaaattaaaagaaaagaaaacagaagagtcagaatgactaaatgcaacgtgtgattctggattggatgctggaccaagatgaaccaaaaaggacattattgagacaactggcaaaactggaatacagattgtttattagataatgatcatgtatttgggctcattatcctgaaattggttattgtactgtggtcatgcaggagatgttcttgcttacactcaagcaattagggataaaaaagcatgatatctgcaacttattcccaaattatttcaataaaataatcccagtggggaaaagagagcataagagagagagagacagagagagagaaagcaaaggtggtaaaatgtttaaaactggggaatcaaggtgaggcatatataggagttcattaaactatttattaaacttttctataaatttaacatttttccaaattaaaaaaaaacaaaaacaaaaaacaaaaaacaaaaagaagctgggcgtggtggctcacactgtaatcccagcacttccagaggccgaggcaggcagatcacttgaggtcaagtttgagaccagcctggccccatttctactaaaaatacaaaaattagccaggcatggtggcaggcaactgtggtcccagctactcgggaggctgaggcatgagaatcacttgaacctgggaggcggaggttgcagtgagctgagatcgagccactgcactccagcctgggcaacagagcgagactctgtctcaaaagaaaaaaaaagaaaagaataccgaatgaatgtttctgttcgtgatgctatttgacagtaaaggaagtcagggaactggtttgggcagtgggtatgtgtgcacacacccacactcacatcagcacacactcacaaatgcacacctacatacacatgcacacacaggcatagtcatgtgcacacctgcacaggtgcacagacatgcacacacacatgcgttcatatcgcaaccacacatgcacacctgcacacacccacttgcacattcacacccacctgtgtggcccacagctgcagcaccagggcccgtgcctgcatctcctctgacacacccatctcctccaggtgcagcaggtaactctccagccatttgctccggtgggcccgcctggccagcctggctggggatagcagcttccacaggcgacttttgacactgcacatgtggtccttgtcccctgcagggacagagcacagagagtaggggttacagattcaccatcccacacccagggctggccaggcatgacctcccatgaggccaagggtcttctgaatgtcactcattgagggtggggagttcctgtgggaaagaagctgcaggacaggcccacagcaggaagccctttcaataccaaattgcttattatctgtcttacccccagtaaaaagaagcaaggggtcttgtctcctgcaggtgggagcctgatctatttcaatcacctctatgtccccatcacccggcccgtagcaggtgctcaataaatatgcattgtattagtctgttttcatgctgctgacaaagacatacttgagactgggtaatttatttatttatttattttttaaaaaataggtttaatggactcacagttccatgtggctggggaggcctcataatcatagtggaaggtgaaaggcacatcttacatggcggcaagcaagagaaaatgaaagccaagcaaaaggagaaaccacttacaaaatcatcagatctcatgagacttattcactacaaggagaacagtatgggggaaaccacccccatgattcagttatctcccactgggtccctcccacaacacatgagaattatgggagctacagttcaagatgagatttgggtggggacacagcaaaactatatcatgcattaaataaatggtagttctttccagagcaggagaaggaacactaaacactgagcagcattctccctccccagggtccaaccccagagcaatgccagcccatgtgcatgaggaggaggccactgtgagcaggctcagcacagcagcaatcacagaaagacatcagcaacaacctaactggcagattgggctggagtctcaaactcaactcactccagagaaggcaggccaagtaaaagagagacgggccagaaaggggccatggcacttagcccaccaaccagccctcggcaggagagggaaacaccccagcatggccagaaggcctgtgctttcaaaggaagctgataatccagacaattatgtataaccttctgatgttttttaaggttagcatccaagtaaaaagtttttaatcactgtgcagaccacagaagcatctctgaaggtcaactttggcccacagatcactagcgtgcatcaccattaaacagacaatggtgtgtttatgttctggaaacatacagcagtgaaagtgagttagtacattttacctacagacacagagagttcccaagggcagactggtaaggggataaagccgggcactgaagaatgacactatttagatattgttttcttttctacttctttttttttttttaaaatattttcatgaaccatacatgagccttaatatacattgttttaaagctccacggtaatgctatttatatgcacaaatataaagtttaaaacaaaaatataaaatataaaatttggttttctccgaaatcaccccttggaaaagtgagagtcattttggattgctctgaagtttcaaagtattggaaactccctcactgactcttctgaaccacaagccgtgtttcaggaagactcgccccaccagcgattctaaacctggctgcacctcacagggcatttgaaagggtcgaaaatgtagactatgttttttttttaaagtatgttggcttcattttcaaataatacgctgaatatgtttaacttttagacttcaacttgagctcattgttttacattgaaatgaatgtcaccatttcgggtgacatttcaatgtaaagcaataagcttaagtgttcaactgaaatacattatcttcctatgtttctccacttttcaggctctctgaagaattacctgggagctcttaaatctctggatgcccaggtgccaaccccagattgatcatgtcaaaatcacgtgcgtgggaactgggcatccagaggtttaggcctgcagggcgcgggcagtgttgaaaccacctcagttgatgccaactctggatacttctaagcatcatctgatgggatggctaaaaaaagaggcaaagaaatttaacacagctttagaaataactggcattctttgaagtctgaccacacaactgcaatcttgaatatcactgtaaacacggcgtttacagatgactttaaaaagcaaggcaggaccattctccacttttcccctgtgcctacagcagttctgagtacataggaggcactctatatttgcacaatcaatgaataattaagcaaaaaaggtaatgcagtatgaaaagacagctgacagaaagtgagaaaatatttgtaaataatatatctgataagggtctaacacccaaaatatataaaagaactcctacgactcaacaacaataaaaaacaaacaacctgatttgaaaattggcaaaggacttgaatagatatttctccaaagaagagatacaaatggctgataaacacatgaaacaatgctcaacaccattagtcattagaaaatgcatgtaaaaaccacagtgtgataccattcacaaccatgaggatggctactatttaaaacataggaaataagtgatggtgaggacgtggagaaattggaacccttatgcattgctggtgggaatgtaaaatactgcagttgctgtgaaaaagagtttagcagttcctcagaaagttaaagaattaccatatgatccagtaattctagttctaggtatatagcccaaagaactgaaaccagagactcaaacagatactcgtgcaccaatgttcatagcagcattattcacagtagccaaaaggcagaaacaacccaaatgtcggttgataggtgaatggataaatagaatgcagtatatacacacaatgtattcactcttaaaaaggaatgaaattctgacgcatatgccaggcatggtggctcacgcctgcaatcctagcaccttgggaggccaaggtgggcagatttcctgggctcaggagttagagaaccagcatgggcaacatggtgaaaccctgtctctactaaaatacaaaaaaaaaaaaaaaaaattagccaggcatggtggtgtgtacctgtaatcccagctactcaggaggctgaggcacaagaatagcttgaacccgggaggcggagattgtagtgagctgagatggcgacactgcactccagcctgggcgacagagactctgtctccaaaatctcatataatgagaatcctagaacaggaaattcagagacagaaagtacaatagaagtatactattcgacagaaagtagaatagaaagtagaatagaagagacagaaagtagaatagaagatatgtcgggctgggaggaaaggcaggtggggaattattgtttaatgggcacaaagcttttgtttagaatcatgaaaagtttctggaaatagataacggcatggttatacaacattgtgaatgtatttactgccactgaattatacaattaaaatggttaaaatagtatattttatgttatttattattttaccacaatttttttaaaaggcatatgaaggtcatttggcaaaaatgagtcaaagatagtgttgtataacaaagaatttgcattctgggcgggtgcagtggctcacgcatgtaatcccaacactttgggaggccaaggtgggcagatcacttgagttcaggagtttgaagccagcctgaccaacatggtgaaaccccgtctctactaaaaatacaaaaaaggataagctgggggtggtggcaggcacctgtaatcccagttacttgggaggctgaggcagcagaatcacttgaacccgggaggtggaggttgcagtgagctgagatggagccactgcactccagcctgggtgacagagtgatactcaaaatacaaaagaatttgaattccaaggtttcagttacccatggtcaaccatggtccaaaaatattaaatgaaaaattccggacataaacagtcataagttttaaattacatgctgttctgagtagtgtgttgaaatcttgtgccatcctgctctgtcctgcctggcaaaaaacacaggataaaaatatagcagtgggctgggtgcagtggctcactcctgtaatcccagcacttggggaggccgagacgggcagatcacctgaggtcaggagttcgagaccagcctggccaacatggtgaaaccccatctctaacaaaaatataaaaatacaaaaattagccaagcatggtggtgggcgcctgtagtcccagctactcaggaggctggggcaggagaatcgcttgaacccaggaggcagaggttgcagtgagcggagattgcaccactgcactccaggctggacaacagagcaagcaagactctgtctcaaaaacaaaaaaaatatatatatagcagtgattggatcatggatcaaatcagtttacatttgtatatcccttagagcagtgtagaggacacactaaaccttacccaagagttatctattgctgtgatatattgttagcacaaagcaaagtgccagcaaccacgtgtttagtatgcatttgtggaaaaaaagaaaaataagaatatagtcacattcacttgcacttgtgtgaaggaactctagaaggatccatttgaaactaataaaactaatcaattatgagcagtgggaattggtggaaggggatgtgacaagaaaaggaaggagacttaccactgttattacttaatttttttccagccttgctgaggtataattgacaaaggaaaattcttatttaagttgtacaacatgatgttttgatacacaaatatggtgtgaaatgattgctgcaatcaagctaattagcatatccatcaccttacataggtgcacactcacacgtgcatgcatggtgagaatacttaagatccactctcttagcaaatttcaagtatacaatacattgtatacttgtatattaaatctccagaacttattcattttataactcaaagtttataccctcaaccaacacacccccatttccccacctcctgagccctggtaaccactgttctactgttcctctgaattcaacttttttagctcccacgtataaatgacataatgcggtatttgattttctgtgtctggcttatttcacttacaatattgtcttccaagttcatctatattgttacaaatggcaggatttctccctttttatggctgaataacattctttcgtggatttacatacacagcagtcctgtcttatccagtttcactttccaaggtttccatcacccatagtcaaccatggtccaagaatattaaatgaaaaactccctaagtttgaaatcgcacaccattctgagtagcatgatgaactcttgtgccatcctgctccatcttgcctggggggtgaatcatccctctgtccggtgtatccacactgtagaccacacctgcccattagtcacttgggagccactgtctcagttatcacgtcaactgtcatggtatggtagtacttgtgttcaggtaacccttattttgttttcattacagtatatcgttataattggtttcattttattatgttgttaatctcttactgtgcctcatttataaattaaactttatcaggccaggcatggtggctcacgcctgtaatcccagcactttggaaggccgacgtgggcggatcacctgaggtcgggagttcgagtccagtatgaccaacacagagaaaccctgtctctactaaaaatacaaaattagctgggtgtggtggtgcatgcctgtaatcccagctactcaggaggctgaggcaggagaatcgcttgaatctggggggcggaggttgtggtgagccaagattgcaccattgcattccagcctgggagacaaaaacgaaactctgtctcaaaaaaaaaaaaaaaaaattaaactctgtcatagttatgtatgtataagacaaaacagtatatacagggttcagtaccacccatggttcctgacatccactgggggtcttggaacatatcccctgaggttaagagggggccattgtaccactatctctgtatctgttcatgcactgatggacacttagtttgtttccatgtctcagctgttgtgaataatgctgcaatgaattggaggtgcagacatctcttcaagacagtgatttcatttcctttgaatatatacctagaagagggattgctggatcatgtggtagctctatttttgattttttaggaacctccatactgttctccatgatggctataccaatttaaattcccaccaccagtgcgaaagagttctcttttctccacatccttgccaatatttgtcatcttttgacatttctaacgggtgtgtggtgatatctccttgtgattttgatttgcatttccccaatgagtagtgatgttgaacaccttttcatacctgttgccatttgtatgtcttctttgggaaaaatgcctattctggtcctttgtccattttgcagtcaggttatttggatttttgtgttttttgaggcagagtctcgctctgtcgccaggctggagtgcagtggcgtgatctcggctcactgcaacttccacctcccgggttcaagcaattctcctgcctcagcctcccgagtagctgagactacaggcgtgcaccaccacgcccagctaatttttgtattttttagtagagacagggtctcaccatattggccaggatggtctcgatctcttgacctcgtgatctgcccaactcggcctcccaaagtgttgggattacaggtgtgagccaccgctcccagatgttatttggaatttttggtattgagttgtatgagttccttatctattttggatgttaaccccatatcgggtatgtggtttgtaatctactttacatttttaatgtttaaaccacgcgaaataatttttaaaataaaataatagaaaatctggcaaaccccccaaaaataatttccagtgaaacatcatatactgtagagattcaaggaattcagtgcatatgggagtgaggaagagaagattctggaaaactgagcttggtggctcaacctggggccctgcagatgagcaaagctgtgtagttaaagggggagtctgcataaagccccctcctgaaatgtggtcgtgggaagaaagcaaatgttcgaaatggttacagcacatttatacaattcactacagacgttcaacaaaacagatacggagaaatgcaactatttacttccattcctaattatttcaatatttaggttgccccaaaaatcaaaaaaagacaaaattttaaaaatcttcccactgggaaaacagaggcttgctgtctacttgggattccagtacaatttgctattttgttgttttttttcttttgagacaaggtcttgctctgtcactcaggctggagtgcaatggcgtagtctggctcactgcaccctcaacctcctgggctcaagtgatcctcccacctcagcttcctgagtagttgagactacaggtgtgagccaccacaactggctaattattattattatattttgtagagacaaggtctgtctatattgcccaggctggcctcaaactcctgaacaaaagtgattctcctgccttggcctcccaaagtgctggattacaggtgtgagccactgtgcgcagcctcatgctgtattttaatgtctgcataaaggccaagtgttgttctgggaaacagagtagccgcaagccccagggagttatggagcatttgaaatgcggctggctcgaatgcagccacatttaatatagggtaggggagacactggattccagagtcagcatgagaaacaaaatgtaaaatatcttatcaataattttaacattggttaatgctaaaatgctaataatattttagatgtattggcttaaataaaatgtattattaaaatcgatttcacttctatttttcttttttagtgtgtctaatagaaaattttaaattacaaatgtgattcccattatttgtctatgtacagcactgttctagaaggataacagcaaacagatagcaatagttacctggggatagatttagagggaatgtggtcaaaagagaattttcctttttgaaatatttgatttttttttaacaaaagtcagaggagcccagttaagaggcccagtgctgtagcagagtgcctgaccttgaacaagtcacctcacatctcagcatctcagttttcttgcctgtaaattgggataataaaagtacccaccacagagggttatatacagatcaaatgcgttattaacatctaaagcacagagatgactgacacagtcctaataaacgctatattattaaataacaaatcttactgaatgttagcaaattattagcccaaggagaacatgttcatgaattgcttctttaattaagaaacaataataaattgcgaaatacagagcacaaagtttgaagacagagagcattgaaatcccagctcttccctttctaacgagatgaccttggccaagtcactttgcatctctgagcctcagtttcccccatgtgtaaaatgagggccatctagctcataggatggtcaggaggattcagaaagatcacacacagaacacacttggtatcggtagaagtttgtaaaatgctacttgctacattctctccattattacgaggtatttcttattggtgtgataaccggatgccatgaatgagggctgccaggcccacggtgattggcagcccaccaatttaaaccagattggtgtatctggtttaaatcccagagtccccatgctatgtagcctcggctgagcccctgcccatctctggacctcagtctcctcatccaaaaaatgaggacccagacttgaatacctctcaagttttttctgggaaagccctctaggccctctagatttgggggcatagtacagagaggcccccagaagacacatgtctttaaagtcttgtgttttacctttgaaatgcatcagagttttgcatcagactctgtgattctttgatataagaatgcctttttccccaaaacaatgttcaaataaacagccccccaaaataatccagtaaaataaatgttccagacagaagcactatgcttagctagggggtctgtttaactgtcccctgcccccaactccctactgtatgagaaacaccagactcaatggcctaagggttctcaaaggattaactttcttttaaaatatatttatactttaaaaagtgaaggaagaataatgtatgcatacagaaaaaaaagaagaaaaataaagaatctaagagttcaagtccacatcttgtaaaaaatgattttctctccaccccttctcggccttcccaaaggcaaaaatctatacatactcccacatttttaaaaatggccgggtgtggtggctcacaccggtaatcctagcactttgggaggctgaagcaggcagatcacttgaggtcaggagttcaaaaccagcctggccaatgtgatgaaaccccagctctactaaaaaagtacaaacacattatccgggggtggtggtacgtgcctgtaatcccagctactcggggggctgaggcaggagaattgcttgaacctgggaggcagaggttgcagtgagctaagatcgtgccactgcactccaacctgggcaacagagcaagactctgtctcaaaagcaaaaacatatatatatatatataaaatgtatgtatatatagtgatatagtataccctctgcctgcagcttgctcttttttgtaacagtagatttcattcactaccagtatgtcccactctgttttagatgcatagatggcctttagatgaatgcataatttatttaatcagcccttactgatggactttaaattgtttctagcatttgcaattataagcaatgtgacaatgaatatgtttgtgtatctgtagacatgtgcaagcatttatgtaggataaattcctagaagtggaagtacaggatcaaaggaatgtgcattttattttatgtttcagcaggttctgccaaaagaggctgcaatgcttcaagcaccccacagcaatgttcgggggctgctttgcccacatgcctctggtcccaattaagatgagaaatcaccgtcccacattgccacctgctgctcatattgagaaatgcatccttcctatagccagcccagggctgctcccagagtgatggggggagttcctctgcgtctaatcagactcctctggagcatctgtgtggaggaaatggtaatggagaaacccaatttttcctggggaagcaatcagtgctaggatgtggcaggtgctttatgcacaggattttgcagacagacagaccaagtttccacctaccagctgcatgtctatgacaagtgatctcacctctctgagcctcagtttccttatctgcaacatgggtatgtgaataacaaccttccagcatggatggcaagatttgataagctcaaatgagttcctctaaaaagataataaaggacacaaacagccggctcataaacaggaaatgcaaatggctactgaaacacaaaaaaatacaaaaattaaccaggctcagtggcacgtgcctgtagtcccagctacttgggaggctgagttgggaggatcgcttgagcctgggaggtcaagattgcagtgagccgaggtctcgctactgcactccagtctgggtgacagagcaagactctgtttcaaaacaacaaaaaaaccacacacacccagagatgtttcatcacagtagtcagtgatatgccacatagagccagatgtccttttttccatcagattggcaattatttaaaggctgataactgcatgttggcaaggttgtggtaacatgcaaattaaagcaataagttacccacctctgcccatcagattagcaaataaatggaaagattgatggcatctggtggagcagatttcttccctttaggtaggcggatgaattgctctgtggttttggaaatgatgtggcagaagcagataaaaattttaatgtatagggcctttgacctggcaaaaccacttctaagaagtgggcagagagaaatgaaataaccagatggtagaacagatacaagtacaatgaaatggtataaaagcaaaaagaaagaaagatagaatattgacatctgtcagagggaaatggctaactactgaaacagccatgtgagggctaaaaaaatgtattggttttttgtttttgtttttgttttgagatggagtcttgctctgtcacccaggctggagtgcagtggcgtgatcttggctcactgtaacctctgtctcaccaggctcaagtgatcctcccacctcagcctcccaagtaggtgggattacaggcgcttgccgccatgcccggctaattttttgtatttttggtagagatggggtttcgccatgttggccaggctggtcgcaaactcctgacctcaagtgatctacctgtctcagcctcccaaagtgctaagattacaggcatgagccaccgtgctcggccagatgtcttgtatttttaatgttaatttcatatccttctactttgctggattcatttattgctggagtttgttttattattgattttctggggttctccaggtacaatatcagatcatctgcaaataggaatagttttacttctttacccattctgatgtctataattggtttctcttgtttaattgcatcagctaatatctctaaaagatgtttatatcaacagagaagaatgtacagctatattgttaggttaaaaacaggttgtaaataacagatacaatttttctttgtaaacacagagacactgtagatgtgcatatttgtctctagttgtgagaacatacaaaataccatgaagggataataccaccatgctaacattggcttcacaggaagctgggcttggaagaaggggtattatattttatacaacctgtaactctgaattgttaaccacaagattatgattctctcataatgtaaacaaaatcaataatgcattaaagtttggctttttaaaaatatataagcaaaaggaaatgggtgatgaagtgtttgagcactgactatgacaatgcttaacctcgtatctggcacatagtaagtgctcagcaaacagtgctttttctttttttcttttctttctttctttctttctttcttttttttttttttttttttgagacggagtctcactctgtcgcccaggctggagtgcagtggcacaatctcggctcagtgcaacctccacccgcagggttctagcaattctcctacctcagcttcccgggtagctgagattacaggcgcccaccaccacgcccagctaatttttttgtatttttagtagagacagggttccgccatgttgtccaggctggtcttgaactcctcaccttaggtgatccacccgtcacggcctcccaaagtgctgggattacaggcatgagcctccgcgcccggccacagtgctttttcttgttacctcagccaattctaacagctgccctctaggaagatcctgctgttccccccattttgcagatgagatcgctgaggcacagagaaaacacacagatgctgggagggggagctggtaaagctcttcaagccgtcagagcccagactctgtcttagccactcccctccacggtccctccagagaaaggaactggggcaagtagaagtaacttgctccgagtcaccagcaaggaagcagcagcgcaggaattcaaatccaggcctctgctgcaagtctctgagcccagcacacacagcacttcccagccttctcaggacacttgtcagacatgcagttttccaagctctcccctggagacctggattcctatggacctggatggggctgagggacctacgttatgaagaagggcctgagaggattctgctcatcagggaagttgggggcacatggcccagggaatggcgccgcccagtggttcctacggcccctgcacacggaatcagccaggacactctaccaacactaagtacgctctgcagccacaaaaacagatgaggtagatttttacaaatcgatgtggaaatgctgtagacagggagttgagtgaaagctgtaagcggtacaacaattcttctagtgtgatatatctaagttatagaagtacaggctaggcagggcgtggtggctcatgcctgtaatcccaacactttgggaggccgaggcaggcagatctcctgaggtcaggagtttaagaccagcctggccaacatggcgaaacactgtctctactaaaaatacaaaaaataaccaggcgtggtggtgcgtgcctgtaatcccagctactcaggaggctgaggcaggagaattgcttgaccccgggaagcagaggttgcagcgagccgagattgtgccgctgcattccagcctgggcaacagggcaagactctgtctcaaaaaaacaaaaacaaaaacaaaacaaaaaacaggccaacagctaaaagaaatgcacgtgtgcactgaaagatacgtacaagaatgttcacaacaacctcttcctaacagctccaaatgggggactactcaaatgtctatcaaccaggaatggataaacaaattgtggcatatttctttaatgaaatactatacggcaataaaaagaacaagctgttggccaggcacagtggctcacgtctgtaatcccaacactttgggagaccaacgtgggaggattgcttgagcccaggagttggagaccagtctgggaaacatagtgaaacctcatctctacaaaaaaatttaaaaattagccaagcctagtggcatatgcctgtagtcccagctactcaagaagctgagggggaaggatcacttgatcccaggagattgaggctgcagtgagccgagatcgcaccactgcactccagcctgggtgacagagtgagaccctggttcagaaaaaaaaaaaaaaaaaaaaaaaaaaaaaaggcatgctggctcactcccataatctcagcactttgggaggccaaggcaggaggatcgcttgagcccaggagttcaagaccagtataggtaacatagcaagactccgtctcaaaaaaattgtttttaagacaaaaaacaaaaaataaataaaaactggactattgatccatacaacaacctggatgaatctcccaacatcaagttgagtgaaagaagccaggcataaaagggcacatactgtgtgattccatttctaggaagctgaagaataggcaaaactaattggaggtaaaagaaaccagtccagtggctacctcgcaggggtgaatactggctgggaaagagcataaaatgtttagatccacttctcagtgcatttatttatttatttatttatttatttatttatttatttaagacagagtctggctctgtcactcaggctggagtgcagtggcgtgatcacagctcactgcaacctccaactcccaggttcaagctattctgcctcagcttcccgagtagccaggaatgcaggcacccgccaccatgcctggctaatttttgtatttttagtagagatggggtttcaccatgttgaccaggctgatctcaaacgcctgacttcaagtgatccgcccacctcagcctcccaaagtgctgggattacaggtgtgagccactgcacctggcctctcagtgcgtttagatgtgtgtgctttcctgtatataaattatacctcagtaaaaaacaagaagttaaaagcttcaaaaataaaataaaaataaaaataacacacatctgtgtgtctgtttagagaaagtgctcccaggatgtactccaagctagtgatggtggttgcctctgtagagggaagtggtgggctgaggctggggagaaagtggagcgctcttttattcttccctgtaaattattctatatggcttgaattttttataatcagcacgaactacttgtaaaaacttttaaagcaactcaaaccttaaaacacaaaaaggaacacacacacacacagagattctccagccccactctaaatgtgctgaatcagaatttccaccaggaacccaagctctggtccaagccctggctccccaccattgcgctcttgcatacccccagtgatggggatcttactgcctccctgggcattggatgtctttctgcctgtgttgcctctggtcctctaccttgaattgggctccccctctgggtctttccatcctcccccccacccactggggcccccatggtgcttacccactgacagggagccacgggccagtttggggagcagccggtcgagctggcgaaaggtgtggaagacatcagctgagtggacgcggtcctgggcctggctttcatgggtgcgtggcagcgcctcaattccgtaaagagtcaggtagccggctctgggggcggcagacagagggtcaggggtcctcctgggacactcatgtgtggccacagctactcacaagagcttcattcatacacccagtgagcaactactaatcctactgtgcgccaaagaccattctgggcactgaacagtcggcagtgaaaaaaacaaaaatccctgtcctcaaggagctgacctctcagcacagggagacagacaacagacgagaggatgagtaaaatgaataatgcgccagctggtgccccgcggcactgtcagacacaaagctgggtagcaggatgggagggcgggggctgtggtgtcaggtgccaggtgagggaggggctggtgtcaagctgacagctgaaggctgagaaggagtcagccatgggcagagcagagggaggggtaggaagcagagcaagcaccaggtgtgatgtcctggggcaggagggagcccggtgctggggagcagcaaggaggctgatgaggctgcagcagagagctcgaggggacggtgctgagatgggggcacagagaaggggaggagatgcctgctcccagggagggattcagggaagacttcctagagaagggagggtctgagctgagatctgcaggatgatcgggggaagcagaagaggaacgtgttcaggcaacaggcacagcctgtgcaaaggcccagagctgagagtgcaaccgtgcctggtgggagaggtgccagctgtggctggtgcaggcactggagccggggtgtgaggcagaggatgggagggcctgggctgtcagggctggccacgcaaggcaggcatttgcagcagtgagaaggttgtgcttgatctgaggggctctgggaggcccgagaaggaggtcagggcctggtcaagtgtgaaaaagggtaagacatgggagctagcatgagctctcatgtgctctcactgaggcacacttacgcacacgcacacgcacacacacaggaccacgctcagaggacgcgccttcacctccagccccctttaaatgccccaggagtccagccccagcccagcgggctgacctcagtcctgggagggaaactgcaggctttcattttgtcatctctgcctcagcagagagtcacaacaaagagacgcaaccaaagccccggggcctcaccctctcaccctccccttgagctcctggatccctgtgcagacaaagaccagagaccaggatctctcaggagaggggttttcccagatgaagagagaatggaagcaggaatgagggtaggtgggggccgagagaggcctgcgtggtccctgctctgtccctcacctgcacagtggtggcagaagttgtaaaggtgcagcccacacactggattcagtccacaaatgtgttttatcaagggagttcctaaaaacaaactaaagcttccttcaaacatttggggaaactcacacaaaatccggatttcctgctcatctcatcttgaaaaaggaatctggctgacctgcggtcccacctggaaacctagcaggagcagagttgcagccgccccttttagacagacacgtgcttgccaggccactgcggtactcccaaggccctgtggtctcggtgacactgcagttgacactggtcatcatttatcatcacacttgcactgttgttttttgctaactcagagaaccatttcccggtacatatatttctaccaaaacaggcaatgaaaaataaaccaaaaaagtaaaccggccgggagaggtggctcacgcctgtaatcctagcactttgggatgccgaggtggttatatcacctgaggtcaggagttcgagaccagcttggccaacatggtgaaaccccctctctactaaaaatacaaaaattagctgggcatggtggcggcacctgtagtcccagctactcaggaggctgaggcgagagaatcgcttgaatctgggaggcggaggttgcagcgagcagagatcgcgccattattgcactccagcctgggcgaaagagcgaaactttgtctttaaaataaaataaaataaaatgaaggaaaagaaaacaaaaagaaaaagtaaacccagaggaccacaaggttttgctctgtggaagcgaagccggcagctccatatcaaaagagcacggctgaagacaggataatcccatatgtaaatacacacacgacccacaggcggcgctagagccacaaagaaaaataaagctgaaccaagctgggtcacaggagggagccatcacgaaaatgggactcaagaaagacctctctgagcaggtggcgctcgcgataaggcttaaacgaagtggggtgggagccacgcagacctgtggggaacagcattcccaggcaagggaacagaaatagcaaaggccacaaagagagagcgtgcctgacctgctcaaggggcagcagagaggtaggtgggaggaggggaggccagggctacaaggtgaggacagaggagaactttgggtgtgactcagtgaggccagggccaacacaggccaggctggtgggtgtaagaggtggcacctcacagttcgggctgcctgaaccggcacccctttcacctctgtgtccctcccatccaactggcccattctctttgtatttcaggggctgctgattgatggcagtggaaaggcctacagctgccaagccagggggcaggagctccagcccaggcctcaggccctgaagacacagttaccgggttacaggtatggatttacgtctgattccccctgagctgattcccctgtgcctgccgctgtaccatggagcctagccagacccagctgcccctgagcctgcctctccccagcctatctctctctgacttctttgtctgcacagggacccaggagccaggagacctgggaggatcactactgtgaacttgctgggtggtttcagctggccctctctggacctcagtccccatcatacaatgcagggtggaccagaccagcatcacccacaccaattacagcccttgacactgtttgcaccaccccagggcaaaacaaaaagaatggggactgttcgtgtgctgagagctgtggctgagagtgcagactctgggaccagccctgtcctgaccccaacacaggcctctgggcaaatgactcaggctctccaggtctcagttttctcatctgtcaaatggaatatgtaaagtcctagcctcctagagcgattgtgagcattaaaagagctgagacacgccgagtctacacatatgcacacacatatcataaatatacccacatgcccatatgtgtcaacgaatgactgccctttatcctagaactatgttgctctaatttcttggaggggttgaaatgtccttttttaaattaaatttaaattaaattaaattctggttggttaagggcatcactaaaatcagggagctgtccttaacaccactctatccctctcactcacgcccacgctcccccatccccaccgctgccccagtcaaatcttccggcagagccagtgaactctatctccaaaagctacccaaattctcaccacctccctgggccaccaccattctctcaccttggtgacacctggcagcctcctgctaggtcctcctgcctccctctccacccctccttacccctacagtccatcctccatccagcagccagagggggctttcaaactaagttagatcatgtcctgcccctgtgcaaacccctgatgtcacccgatcttactcagcataatttccaaagccttccctgacctcccgactgcctgaggcctgcttctgcccacttctctgacctcctgtccaccttccctccttggctctttatgctgtagccacactggccgtctctctgagcttcctcccacctctgggcctttgcacctgctgtttcccctgcctagagtgttggcgtggtgggcactttgcagttaggtcttggctcagaagccagacccccagagcatgaccctgcctcgtcagtcggcctaagaaagccccccagatgctgtcaccccacccgtggatctctgtcatcgtgtttatcactctctgacataactcaattcggcctcccccactggagtgtcagctgtgtgaatttggggacttcatctgtcctgttccctgctgtatccccagagcctggattagtgcccggcactgctgaaggaaggaacgttcggttgtgcagtttttaacatacatttacaagaccagataaaaggttaaggtcccaagttgatctcccaaacattttgttttctgttctgtgaaatcccaaagtctggaagccacaggacaagatgacctctgaagtcttgctctgtgacttcctctctgaatgacctgtaaggtcccatttccagccagtgtctccttttacagttcatgagctaggtcagatgaacagccggggccctggtgcatggcgtctttcctacagtctttgctttgggtgtctcaaattgcttcccccacccacagagtcctcacggttcccttggccactgctcatggctgacacaggtcaaagtgccgggccccagcaggagggtgggggctgcacagcctcacctgagcaggaagctgtaggagaagtcgaggagacccatctcgtgccagccactgcctgcttctgtagcatcgcccaacagcactgcatggaggttggtatacatggcttctgtgagtgcctggagctctctgtggagaagagtcctgaggcaggaaacaaaagcatgaaaatttggcttccaaagggaaatacacacctacaggcacctccctccccaaacctaagggtcccagagctcaagctccccattggcaaagaggtcctgcggaagagtagcttaaataagaggatattattatgactgtcatcgtcaacaatagttcccatctgttatactgagcctaatctcatttcgtcttcagacaaacctgggaataagagttactattatgacacccattttacagatggagaaactcagaaacagagaggaaagtgacttgcccaaggtcacacagccaaagcgggactgaaatcctggtctgcccaactccagcatctgaattcttaaccaggagagtctttccctccctaaggcacacagcttggataagggacccatagcgttctggaagagaaggaactgaaaagcaactcatctctccctgaaatctaaagataggaagatctgttggaatagctgtggtgttccctgactcaggactgccaataagatgtgaccctggccaggcatggtggctcccacctgtaatcccagcactctgggaggccaaggtgggagaatcacttaagtccatgagttcaagaccagcctgggcaacatagtgagactccatctcaacaaaaaataaaatattagccaggggtggtggctcacacctgtagtctcagctactcgagaagctgaggtgggaggatcgcctgagtctaagagttcaagaccagcctgggcaacatagtgagattctgcctttacaaaaatagaataaatacacaaagaatcactagccagatgtgtagtaggtgcctgtagtcccagctactcaggaggctgaggtggggaggattgcttgagtccaggagtttgaagctgcagtgagctatgatcacaccactgcactccagcctaggcaacagagtgagactctgtgtcttaaaaaaagaaaagaaaaaaaaaaaagacatgacctcacatgagagtgacacaaggaaaaagggatgtgggctggagatctggtcccatcgtgtggacctgcacagagtgaggagaggccccgtctggaagagtgtggcagaagctggaagctcccctatactgagcctccatgatatggagtctacactgagccatgactgaggatatgattagaagccaagaaaggggtatcttgcatctaagtctaaggcctctctgctccttgtgtaggatctggaccaaaaaggatatccctacagcaagtgaagtggggtgtccatgggcggtgcacagcccatggtcaacagcaacacctagtggcagcaacaagaacagtgggagagtgccaatcagggccctgatctgtcatgcctgctgtttgggaagtaggatggactgctgtttgggaagtaggatggacacctttagactgagtaagccagaagtgcctgggtaatccaccagggcagggtttgcacagggcgtccatgaactcctgggtatgaaaaggtttgggatgttcaagttggaacatagtgggaaaaacgacagacatggctcatgactcatgtatgacaatgcatgtgaagggttccgcacggtgcctggcacattgtaagtgctcaatacatgggatctggccttcaatggaccctgacccagctcttctccccaccccactccaagcgctggtcctcagcagagacaagccctcaacagatgtggctgctgtgcccagaagacatcacgccagcttgtaagaaattccagaaaattcctgaggcaaacactgaaggaaactgggatcctccctgggtagcaggggcagattcagtgagctgtggattcctattgctaatgggacccccagggtccccctggaatgtcaggacccaggacactcaggctccaagcagctgcccccaggccaaggttcagaggaggcatcatgtctcatcaacatccacttcatcatgctggccttgcttcagccttaactatcttgcaaaacagtttcctagatgctcttcctaacctccagagggtattcctcctggagacagatcactgaagatcgccattggactgtgtgaactctgcaggggcggacacagggtcttatcagccttggtatcttagatgaaggagaatgcgctgtgaagtcagtggacctgggttcaaatcccagtcctgccacttactagcagtagactttgagcaagtcacttcacctctctgagcctcagtgtcctcatctgtaaaataaggataaaaatgcccacctctttaggctaatgcacagatatgaaagtgagcctatcagacacctggcctataatagctgccttcaaatggtggttggcaccgttctgcacaccctacatccagggcaatgaccagggtacaatgggtcctcagatgtctgctgaatgaatgcagagcaaacatgttcatctgttctcttattgatatgatgactccatatgtggctgggcatggtggctcatgcctgtaatcccagcactttgggaagctgaggcgggcagaccacctgaggtcaggagttcgagacctgcctggacaacatgatgaaatcctgtctctactaaaaatacaaaaattagccaggtgtggtggcacgtgcctgtaatcccagctacctgggaggctgaggcaggagaatcgcctgaacccgggaggcggaggttacagtgagccaagattatgccactgcactctggcctgggcaacagagagagactctgtctcaaaaataaataaataaaataaaatgattcctccatatgtttcaggagctgtaccacttctggctatgtggcctgagacaagtcacttctctgagatccagtggctgcatctatgaaatggggctgtaagttacttagcctccagcattgttgtgaagactaatgagataatgcatgctgcctggcagagtatggactcagaaatattcatcattccacctctctccttcattttacagaggaggaaacagaggctcagagagggaaagaggtttgtccaaagtcacaaagctagggagtgatggggctgggatttgaatttaggtgtggctgacccaaaccctggtctcctcctactaaaatcagggctgcctccaaacaaacaaacaaacaaacaaacaaacaaaaaaacccgccagagatgagagacaaagagttcttcttccacccaattcttttgggttgttttttgttttgtttctgtttgtgttctcaagacaaaatgtctttaccgaacatttgctttggaaccaagaataacttgggccacatgagtagaaatgagtcgcccaccctggccctcccacaggtgccatctccagccactcacagtttcatcctggccttttcatcactggggctgtaatgtggaagctgcacatcaaaaatcctctccatgaggaagatggcataggcatggaagtcgagcctggtgcgaggctcccacaccaccgcgtcgtaggagtgtgggtccaggagaacggtgacatacctgcccccaaccagtatctgtgggaagttgccagggatagagtgaggagtgtcactgtgaacagcagccgctctcagtggtcagggccttactgtgtgccaggcactgccccactggacagtaacacactatgttctcttatctatgcctcactaccacctaccaccctgtgaggtagggaccatcactcacccatttatagctgaaaaagtgaggcttagaaaggagaagaaatgtgcccaagatctcatagctgagaagtggcaggactaggactggaatttgggaatattgaggctttttaaaatcaaagactgtgttctctaccacctcactcttaagcacctgccatgattatcttggttattgccatatctccagtagccaggagagaaggcggcagatggatcctgtgcacatcatggatggatggatgaatggatggatgaatggatagatggatggatggttggatggaagaatggatggatggatggatggaaggaaggatggatggataagtagatggatgaatggatgggtggatggatggatggatgaaagaatggatggatggatggaaggaagaatgaatggatacatggatgaatagatggatggatggatggatgctgttgggtaaattccagtgggtggattgtagaagagtaaatgggcagatggatggattggtgaatgggtaaatgaatggaaggaaggaaggaagggagggaggaaggaaggaaggaaggaaggaaattgctgggtaaatacttgtggatacaatgttagatagatggataaatggaaggatagatcaatgaatctatgttggatggaaagatggatggaagggcagctagaggttggttggaaaccaaatgtaccaataaatgttgggtacatggatgagagaatgctaggtagatactgggtaaagtgaaggatgaatgttgattggatggaagttggaaggatacatggaaggtgggtgggtggtggtcgtttgaatagatgttgtaaggatggatggatgagatataaatagatgtatatccagtggggagacatcgaatactgaatatagctgagtgttgggtggatagtggcagatgaacagaaagatgcgtagataaacagaaaaatgaaagttggtggaaactgaccagttatccctcagtatccatggaggattggttccaggacctcctgcagataccaaaatctatggatgctcaagtccttgatttaaaatggcataatatttgcaaataacctacatgcatcctcccatatactttaagtcatctctagattacttataatacctaacacaatgtaaatgctaaataaatagttgttaaactatatttttagggaagaattacaacaaaaaagtctaaaaaagtttagtaccaacacattttcccccaaatattttcaattcgtggccggttgaatccagagatatggaacccacccatggatacagggggccaactgtatacagatgaaagttggatgaacattggatccatgagtggaagaactctgggtagatctgggcagacacatgaagggatagaagatggataaatgaattgacagatgtcgggtgaatctatggaaaaactgatgggtgagtggatagacggaggttgacgaatgaatgctgagtagatataaggatggaaggacgcttagtagacaccaggtggacaggcagaagaatgggatgggaagatggatgttgaacggatggaaatggaatggatagatggaggtcagctgcatggatatacaagtattggatagatattgagtgactgcataactccacgctgggaagagcaagagggagactgaagggatgatgttaggtcagcattgagagtgcagctggacaggcagctggatagaaagttggctcgaccactcagatggatgttggatggtggggtgggggggttggcatagggacatatgttgaaggaatcaacagaaaccagatatgaggcccagctgctcatccccatccctcccgaggcacaagaggcacttacagtaaagatgtcaccgtgcttctccttcatcctcgtgaggaagctggcagcatcttttccaaagtccaaggcataccccaaccaggggatgctgcccaggtccaggggaggctcaccaggtcgcctacagaagccatggcacttgtcaccatttgataaggcaaggaagggcataaagagtgtaggttgcagagtgtgattttgaatggagcagtcggggaggtaatctgaatggagcactcggggactattgcctcacctgctccttttctcttgtaacatgtggatgaccacaccctccctctttcccctccagcccacttttccccctttaaatactgaaaccctcagagtcatctttgaagaaaggcacagaccacagactgtttctgtgattctgtggtttttcttctccctggcattgtccttaaccttggtaaaataaacatctaaattgattgagacctagcttagatactttttagtttacaaattggcgaccatgaagggactccatgtaggtggccctggcctttgacaaatctcctgttggtgtttggtaacagcttggtatctgtcttcattggtcaaaccagtagggctgggagctccctgctgcagagaatcccgaatctctgaaaatttgagatctaagagagctacaatttgagagctaagttttattttgttgtacaactccttttctggagtattacttgcttccaacaaggaaggcaagttttcctgcttccatgacgatggagagcacgtaactcccttctggagtttcaactcacttccaacaaggaaggcaagtttgaagttttttttcctgctttgtagatggtaaagtgcaggccaggcacagtggctgatgcctgtaatcccagcactttgggaggccaaggcaggtggatcacttgaggccaggagttgaagaccggcccggccatcatgatgaaacgtcatctctactgaaaatacaaaaattagccaggcatggtcgtggtgcatgcctgtagtcccagttactcgggaggctgaggcaggagaatcgcttgaacccaggaggaggaggttgcagtgagctgagattgctccattgcactccagccagggcgacaaagcaagactccgtctcaaaaaaaataaaataaaatttaacctgaaagactggttcaggccgtggtgggaagtgggggtcagacatgactcattataccctccagcattcatatcaacacagaccttaagtctgataagaaacctttacatctattcgctctgaagcctgctacctggaggcttcatctgcatgagaaaactttggtcttcacaacctcttattataacccagacatttatttctattgacaataactcttgcaaccaattgccaatcagaaagttttaaaatccacctataacctggaagcaccccccacatcaagttgtcctgtctttctggactggacaaatgtatattgtcaatgtatttgattgatatctcctgtctccctaaaatgtacaaaccgagctgtgccttgaccacgttgggcacatgtcatcaggatctcctgaggctgtgttgtaggccatggtcactcatatttggctcagaataaatctcctcaaatattttacagagtttaactctttttgtcagcagtgtttatgtatgtgtgtgtgtttatgtgtgtgtgtatgcgtgtgtatgtgtgtgtatgcatgtgtatgtgtttgtgtgtgtgtgtgtgtgtgtgtgtgtgtgtgtgtgtgtatgcctttatgctttcttttttctctcctaggttcttgttttttgagaaaaagattttttcttcccagtcgactgaattctgttttctccatttacttctgcctgtctctccttcctcttgccgccctctgctgcataagggacctaaaataatttctaacagcctgggattccttaaagaaaacagagaaggtgccagactccttctggggagaaacctctgtttttccttatgaaaccctaagagtgtaaaaagacaagttcctctcagatcttaaactgattgtttttgtattgcgttatctgatttcttttttttttattaactaaaatagctattactacaggaactactcttgtgtgtttaagagagggagtggttaaaatacttagagaaatgcttttgtaacaaagtgcactgtaaaagcattacatggcttagtctcatgatatctctctccttttagagacccaggattcagtgtggactctgcccagagctcagaggtccagttaaaagacagagactaaatttaaatctacctatctaaataaagtttgtctcctcataaaatcctacagaagatttctataattttatgtttggcttgtggcttggcatccatttttaatctccctctaacacacccagtctctctctccctctttctttctctctctctctctgtctgtctctctctctctttagagatatacatttccctatctgattttcacccaagagttgttcctttagtatgcaagtttggctgacaattgcctagggtaatgaaacaggttatcaagaaattggaagtctaagatagttgtcctttttagacccaggagtcaaacactataacttaacagcaccaggacttaaaaacgatacagaaagtcacatggatgtaataacttttatttaaaattgttttatatcagctttcctaggcaaataaaaacataaaacaacttagacatattaagaaaagccaggagctttataacaggagaaaaaaaggggtcttatgaatcttatcagatctactgctgcctgtctgtctatgtatttatatgtcctgtatataatgtttcactacaaaaaaatacataagaggtctaataaattggcttaaagaaaaaaatcaaatactttatcagaaaaatagaaactttaagcccaaatggtttttcaagctcacatgacttaagtaaatctttaacaaataagctggttttaaaattattggtaaaataaaattagaaatggtttcagaattgtcaatatacattattgttttatatgtattagtcaaggggttatatatttatctctgctagatattataaggtgacaaaatttggcatgaggattatgaagctataaatccagcccaaaagagaattatcattgtgtaactttttgataaataaggcatttaatattgttcatttaatgaaaacagttaaatcctgagttattggcaaaaaacaaaaaacacacatgtatttaactttaaagttcttacttaagtaaacatctgaaattcacagctataaaaatgattaacagggaaataactttaaatagtgactatcacagttttcataagtaatctaggtaaactattttaaaaaattaattaggtaaatgtaatgaaataaatgcttataaataaatgtcatataattcagaatctaaagtgatattaaattaaataatagatacccattaaatgtctgggtcatttccaatttttccttaaaaagttacagaaaaacatttttcttaaaaaagtgttcttattaaaaggaaatagttttgtctaattcaaaggttgtttattaaacaacgtaaaaagaataagtaaataagaagcatgtaaagaaaattataaaggggtatctttggcaagaaaggttaaaagaaaaataattgtatatggaaagaatcccgtaaaaattttttgtcctaaaataaaatgattgatcatttacgaaagagagatgtttaggataaaacaggaagcatgttgtaaatggtttgtgtaagtcataataaggtttataaaaagagaatttatgaaaaacattttatgtgaacaagttgactataattaaaaggaaattatttataatagtctttctagagattgggttttgatattaaaaatgcactaatacactaaagaattggttagaacaaaattttcttaaggtattattttactgttaataacattacatgagattttaatttttttaactcaaaagttcaacttttattgcatcttgctattttcagctttctctcctctttgagaaggactgagagaataattctctccatcaacattttcgtcagctcatataaattttttccctcaggtcctaactgttgtagcctgatgctaaaaatgctttatcataaaggtctaaaggaaatgttttcatccaatataacattctgtgctcctggcatttcttaatatgtctaaattgttctgtgttttgatttgcctaggaaagctgatataaaaaaatttttaatgaaggttattacatccttgtaactttctgtaatgtttttaaagtcctggtgctgtttagttacagggctttgactcctgggtctaaaaaggacactgagtcctgctaaatcttaaacactgacagcagttaaagcatcatcttcagacctaggaggagatgacattcaaaataagctgcatttgtgagacatggagccagaaatgaaaactattcaacctctctaggcccagggactatcatggaagaggtgggcatatgagattgtaagggctgattctgagagattaaattagttcagagtttctctattaattaaacattaacatcaaaggcacactgatgcaagaccagcatctgggctcctgtgtcagattaacaaggttttcttgaagcattatcccaccctttaaaaaattataaaagtttagaaaatggtttatggaaattacatcttagggtcaagatgattaaaatttaatagatttgtttataagatttgagaaacaggatttaattggcctcatgctgtatttattagagcttattatttggaaaattaagtctcctctctcaaagaataaaggtttttaggccaggtgtggtggctcatgcctgtaatcccagcactttgggaagctgaagcgggtggatcacttgaggtcaggagttcaagaccagcctggccaacatggtgaaaccccgtttctactaaaaatacaaaaaaattggctgggtgtggtggcaggtgcctataatcccagctagtcgggagtctgaggcacaagaattgcttgaacctgggaggtggaggttgcagtgagccaagattgcaccactgcactccaacctgggcgacaaagtgagagtgtctcgaaaaaaaaaaagaataaaggtttttgccttttttctgaaatctctgagttatacctttggctaaatgaatgacttattttacaataacctgtgattctattttgtgatgtcaagtgttttaaactttctatatttgacaaactttccaaaataaaatagtcaattcagtccttttgacctcattaattttttggcattaggtcctctgaagtccaaaagagacatattcggcttatttggtaaaataaaatcatacaggaagcattgtcaaatatgaaatggtgtttaatcttctttggattatatttatataaatgagttgcttatataaatgagtatgtgttccaaaattgtatgagattcctgtgattctgatatgacttagtatacatcatcagtagtaattatgattattatgtaaaactattgaataccacagacgtaaccaaatttccttgtcaattgtgtctttaactatggctgttctaagacttttgtcatccacagttgttttagtttgatctttttataggtgatttataatcagctatagaactctgaggagtactcttaaacatgggcttctgacaaccttagagattgtgccattggaatagggagaaaaacttccaggactgtcatggagaactgatgtattcatgaggactgctaatcccatcttgagcagaacaggagttaattgcatgaactgaactaacaggagattgaaataatcttttatgagtttttgtttaaaacatttgttgattctttttgttttgttttacagagtcaagaaaactttctcttcttttaagctatttatagcttttaacaattcagtaaagtatactctcatgagaaaaatttaaaacagaatttctttctctttacctattttttccaaaacttggaaactatttgtgagtattcttaatttatggcaatgtagttatttgcctaagtatcttttttcttttataacagggcataattggagacactggttattttaccaaggctttaactggaatgacatattttcagactactttgagaaaataaggctgaactatagagctaataaaagcaccttggaaaaactggcttcatataccctgtcgtttacagggtcctgacctgtggaaagcaaagaatgtcactttttgaattcactcaattcatacaggtatctgcaggcacagctaaatccttggctgggtgtgaggcttttaaaaaggtctagactcagattccttatggaaaagcttccagcaaagccaattttaaaaagaagagagagctcatatggcaaatgatcagtcttgctgcattttatgaaaataatcaagccaagtataatataactaaaacttattttacaaataagttggtcctactatgattttgtctttaataaaattggggaattggagagagaaaagtcatgtttcaaaattaactatagtacacctgttattagagtctagacttgtctaatgtttttccatttttattattttccacaatttggactgaattctaaaaattctcctggctccaagtctccaaaagaatgttttcaatgttttcccttcttttttttttcctcccctcatttttcctgatgtgaaatcactaaaagttaagctgtgcttttcttaaagccctataaactgaacttaaactttggaagaaaataaaagcaatctctttatatgcagaaatcattttcatacctgcctactgatatacggacttgagagtaatatggcctctatcagttttccaggttcgttctttcttttttgtttatctgcttacttcctccttttttcctgttttctttctctcttattttctttgtgtgatgtgagacttcacaacctactaaaactgagctttcctaacaatgtgggacctattcgtctagaaataaaccatcctagacatgagagatcagacaaaacctgagaccggagattcattttcttctaaaatgctttctccaaaagatcttaaatagaaaaggggggcaggcatacatggtggttcatgcctgtaatcccagcactttgggaggctgagacaggaggatcacttgagcctaggagttcaagaccagcctgggaaacagagtgagaccccgtctctactaaaaattaaaaaaattagcccagcatggtagcacatgtctgtagtcccagctactagggaggctgagacaggaagatcgcttgagtctggaaggttgaggctgcagagcaaaaaacgtgcaggaagaaagaaaagaaaaaaaaaaagaagaaaagaaaagaaaaccagggagaaaagaaaaccggggagaaaggaaaataaaaactcaggacaccaattcactctgccatgaggaaaaaattaaactgaaagctgagtcatgcaagaagctgcctttcctactattcctaagcagatagctacagataaaagtttcagtatctccataggcagctactctatgttcaccttattttatgtaaagtgctgatttactgtgcatgagagaaatacatcattgactatcgccctacccgttccttttctcttgtgacatggggattaccataccttccctctttctcttacagcccacctttcccccgctttaagtattgaaaccctcaaagtcgtctttggagaaaggcacagacctctctactgggcatgtccttaaccttggaaaaagaaacatctaaattgattgagacctgtctcagacactttttggtttacaggtaccacttcacccaccaggatggccataataaaaacaaaaattttaaaaaaggaaaataaggctgggcatggtgtctcatgcctataatcccaacactctgggaggccaaagtgggaggatctcttgatcctaggagttcaagaccagcctgggcaacatggtgagaccctgtctctacaaaaaatacaaaaattagccaggtgtggtggtgtgcacctgtagtcccagctactcaggaggctgagtttgggggatcacttgagcctgggaggtggaagctataatgagctgtgactgtgccactggactacaacctaagcaagagaacgagaccctgttcccaccaccaaaaaagggaagaaaataagtgttagcaaggatgtggagaagtgagaaccctcatacattgctggtgggaatgtaaaatcgtgcagctgctttggaatgcagtctggcagttcctcaaaacgtcaagcatagacttactacaagacccagcaatgtaccctaaagaattgaaaacgttggatcttatacaaatgtatacactattattcgtaagcagtgtcagaggtgttcaaaccagagtgactccatgttgaataggagctgggtaaaatgaggctgagacttgctgggctgcaatcccaagaagaagttagacaatttttttttttttttttgagatggagttttgctcttattgcccaggctggagtgcaatggcgcgatctcagctcactgcaacctccgcctcccaggttcaagtgattctcctgcctcagcctcccaagtagctgggattacaggaatgaacaaccatgcccggctagttttgtatttttagtagagacaggatttcatcatgttggtcaggctggtctcgaactcctgatctcaggtgatccacctgcctccgcttcaccaagtgctgggattagaggcgtgaaccaccatgctgggccaggaagctaggcattcttaagcgcaggatgtttacgatcaagggaacacgttaaatcatgcttacccaacagacccaagacttaacagatccaggacttaacagacccaggaaacatcctgctgtcccgatattttatgaacaaaagccttcttagtttaagaataagttttgctttaaagataataatatagattcttatggaagattgttaggtaacaatcttttgtccccagcccttgtggtagaagagcacacctctcccatgatttttatcttctatataaacaagaagaattgtaactaaggcagacacattcctcctcttgccttcggaaacgccctggtctgtctatggtgtggccactctttcgttcctttaccttcttaataaacttgctttcacgttactctgtgaactcactctaaattatttcttgcctgagatccaagaaccctctcttggggtctggatcaggaccgctttcgggtgacagcagcattattcgtaatagctgaaaagtgaaaacaactcaagtgttcgttgagtgacgaacggataaacagaatgtggtgtatcaatgccacgaaacgttactcagccacaaaaaggaatgaagtactgattcatgctacgatgtgggtgaaccttaaaaacattaagcccagtgaaagaagccagacacaaaaggccacatattgtattaattcatttatatgaactgtccagaattgggaaatcaatagagatagaaagtacattagtggttgcccagggctggaggagggggaaatggggagtgactgctaatgggtacatggtttcttttaggggtgatgaaaatattctggaattagatgatggtgatgattgcacaacccggtggatatactagaaactattgaattatacacttttttttttttttttgagacggaatcttggtctgtcgccaaggctggagtgcaatggcgcgatcttggctcactgcaacctgcacctcccgggttcaagcaattctctgcctcagcctgccgagtagctgggattacaggcacccgccaccacgcccggccaattttttgtatttttagtagagatgggtttcaccatcttggccaggctggtcttgaactcctgaccttgtgatccatctgcctcagcctcccaaagtgctgggattacaggcgtgagccaccatgcccggccgaattatacactttaaaaggggagctggagggccgtggcatgatcatagttgactataacctcaaacgtttggactcacgcaatcctccagcctcagcctcccgagtagctggcactatatataggcacatgccatcacacctgactttgtttttctatttttttatagagacagggtcttgatgtgttgcctaggttgatcttaactcttgggctcaagcactccctgtctcagcctcccatagtgctgggattacaggcatgagccactatgcccagcccaaaagggtgaactaaatgggatatgaattatattccattaaagaaaaaagaaaacagggtggtgtgagacagtgaggggggctggtttacaaaaggtggtcaaggagggcctcctcaggagatgccacgtgagcaaagaccagaaggatgtgaagggagtgctctgggaggggcagggagaagagtgttacaggcagaggcaacagcaagtgcaaaggtactggggtgggagcatgctcggtgaggttttcgagacagcaggagccagcgtggctggagtggagaatgtggggacgagacgtaggcgatgatgctggagatgactttgtggaccacgagggccaaggccaaggtgggagtccggctcctatgccacgcgtggcagggatccactggagggtttgcagcaggagccagtaagtgatgtgaccacacctttaaagggtcataccagagaaagacaagaggaaggaaggagatgtgtcagggaactaccgtgacccccccaggagagcaatgtggtggaagcaatggccatggtccccggggagccagacctaacatctgagtctcccactttcagcacagggccttttgttccacacccagcagttcagggaagcagccacttctcttcctcctttccccctccctctctacctccctctgcccctgtctcctgctccctttttccctctacctggctgcccccagtataacccaaagggtgggacagctcgtgggcaggagcaaatggccagatttgagggccaaggctgggaaggatgggagcagaagcaaagatgaaatttgagggcctaggaagtgcctctcccaaccattccctcctctccccagcccatcccggcttctctagtcaaagaggagacttgcaaatttgagctctgtgagtctaaggaggtgcagggccttgccttgtgcctcatctttttgtgagcccctgggctaaggccacttctcctgaagtctccacgtgtcgtgctgcccaagtagccttggaataactggttcatggcagcccccttccagcccaggtcagagcctggcagactggacccagaagcagtgatttttgcataagaggcaggagggcatggtcacgatgagcccaaactttagcaccatacttcctggcttcaaatcccagccacgcttcttgctggctgtgtgacttagcttctccatgcctctatttcctcatctgtaaaatggaagcaataatgctactgactgcattgggctgtgccaaggatgaggggagttacagagcacctggcacctagtagctgggaagcagctgagaagcaggagcagtaagattcctgggcaccatttacctagtgccaactacacatcaggagctatacttggcattttccaaacgtttccttgtttggaaataatggctaacatttaatgaacgctgatggtgtgggagacaccacactgaggactttatcccagtgactcaatgaatcctccccctaaccttatgaggaagcaattattactgccaggcccattttacagaggaggaaactgaggtgcagagggctaagtcacatgccagagggtccaacatagaggacttgggtttctaatccagacaggtctggctgcagtgcccaccctcttgacactaccctggcccccagtcaccctaagtgggcattttcacctccattttgcagagatattccagagacctactcaaatgcaggccctgaaattttctcctaaaacatctttgcaggcgggagcaggctttcttcccctgcctttctcctggctgtggccggagctccccagcgagccaggtgttattcctggcagctttcctctttccccagaaaagtcccaaggaggcgcagacaaaggcaggaagcccggagcccaggcgcctgacccctgatgttggctcctccagccttgggccctcaatccaactcaggccgtggtcacattccagggtgactcagcctgcagccagcgggggcgaaggaggctctgttttggggactgtgggctctagccccacccacggacactctcacttttttttaggtactgccaggccctggcgggcagggcggtgggccctgacctttccatccccggctcctgcccacacagccggtttcctgcccaccctgggtcagatcccaaggcatcttttctgatttccgactggagccccatcacatgggttcctctaaaaacggcctattcctcactcactgacccctgtcgcctgccctggatctctctcccacttgaccctttgtgaaccagggaaaggagtcaaggatgggatgtcacccgcctccatgccccctgacgtatcgcatcttcactagatggaagagccatgaagggagggcgtgttgttcactccagcactcagaacagtggctggtctgaatgaatcatgtatgcagtcggtgctcaatgggcagcacctgcctcccagagttgctgagagggttaagaaagccaatgcaggttaagcacttgacacagagtccatcttctagattgtccagagcagaggctggcatggttcagctgtgcaatgttgggtagactgcccaacctctctgttcaatcatttcaactcaatgcagggccttaagctctgggaggatttaatggggaacaaaagggggcttagttgcacaggtgagctggagcaacccaaaattctgtttaacctgcttaacccattcttcccccagggctcacccacaggcctccagggttttcagtctgccattaacagggtttcccagatgctcttccatacctgccccgcactgctaccactgtgcataaaaagcacgtggccttgccctagtttttgttttctggtttttgaaatagacacaaattcacagaattatttctcaacacaggaaaaaacagcagaggaagtacagtggtaactagaatagctgcatgctggagaggcaatagggagtagtggggactgtggcaagatttagagagggtgctaccactgagtcccaggaaagtattgctagatcttcccatttttcagaagaagttggaaatctagatttttgtgtatggaatcccccaattttctccccatgtcccacacagcacaaacccagcccatccagggctgaatccagtcacggaccactgttgggtgacctctggtcagtgcatgttagaatgagacagatttatttgtgcctacaaattctgcatcctgcaagggcccagaccagccactgggccacagtgaccctcgcttgatgccactatgccttccggacccccagaaaaggagcctcccaaccaagagatctctctcagtgctccctgtggtggtcacacaagcccaaaggaagagatgcagtagcctggtgatatggctggggcttgagagaccacctccatgagccacctcgaagtacagataaactgaggcctgggaagcaggaagaatgcttctgatactcacaaggcaaatcaattagtttcaaggggcccacaagccatactcctaactctcagctcaccaccctcatgttcaccgaatggggctcgaaaattcttgctgtaattgcagaaatttgaatttgaactgggaactacatgacattaagaattatctttttatattctcaggcaagaaaatagaattgtagttgtcagttttatatgcattctgaaatattcaagggtggaatatcatgacatctaattttttttttttgagatggagtctcgctctgttgcccaggctggagtgcaatggcgcaagctccgctcactgcaagctccgcctcctgggttcacgccattctcctgcctcagcctcctgagtagctgggactacaggtgcctgccaccacgcctggctaattttctgtatttttagtagagacggggtttcatcgtgttagccaggatggtctcgatctcctgacctcttgatcggcccgcctcagcctcccaaagtgctggaattataggtgtgagccaccgtgcccagcctatgtctaatattttttaaataatgttaatgactgtcaaatcaaggtataggtacatggggcttcttaccgtattctttttctttttctgtatagttgaaatgtttcctaatttaaaagttttaaattaaattctaaaggtaaagacggagttgctcactcccagaagtagtggtgtcttactgggataagcatgaattttggaggggcctagatgtggagtataatttttgtatgaccttgggaaagtcacttcatctttttaaacctcagctgtatgataagggtgatggaaattacctcaaggcttggtcaggataaagaaatgagacaagggagctggagagccttgcttattttaacccaaactggatcaccattcagacggcatcagggtcacccacttgtttcacttgtttgcccttttttttttttttttttgagatggagtcgctctgtcgcccaggctggagtgcagtggcaggatctcagctcactgcaacctccatctcccggcttcatgccattctcctgcctcagtctcctgagtagctgagactacaggcgcctgccaccacgcccggctaattttttttgtattttttttttttttagtagcgatgaggtttcaccgtgttagccagaatggtctcgatctcctgacctcgtgatccgccctcccggccattgtccttctttaagaattttttgcttgtagttgcatttcttagtatctaaaagtcacatggttctaagacttttgagtgttcagattaccagtataatgtgtgggaagactgagaattcattcttcctgtgaattaaaaattcttgcaaagccaggcgtggtggttcacaccggtaattccagcactttgggaggctgcggtgggaggatcgcttgagctgagtttgagaccatcctggacaacatggcaagatgccatctctacaaaatttttaaaattaactgggcatggtggcacacacctgtagtcccacctactcaggaggctaagatgagaggatcacctgagcccaggagttcaaggctccagtaagctataattgtacactgcactccagcctgggccacagtgtgagatcctatcactaaaagtaaaagctaaaaattcttacagcccagagttttaatccagacagaccttgagcaagttgcttagcctttctgagcctgtttcctcctctgtaaaatggagataaccagagtgtccctagctgaactggaaggagaaagtgagattggggatctaaactggggtccccagggtccatgcacctaccctcaagctgccagtgaccctcattcccacacttctccccactacccactgttgacccttccaaggtgcccacaggtataaaaatcaaaggctcagcagggcgcggtgactcacgcctgtaatctcagcaccttgggaggccgaggcaggcagatcacctgaggtcaggagttcgagaccagcctggccaacatggagaaatcctgtctctactaaaaatacaaaaattagctgggcatggtggcacatgcctgtaatcccagctactggggaggctgaggcaggagaatcacttgaacccaggaggcagaggttgcggtgagccgagatcgtgccattgcactccagcctgggcaacaagagggaagatccatctcaaacaaacaaacaaacaaaaaaagagcccataacgtattcacatgatggaagactccagagaggatcaaaagaatggattcgatctccttgtagcaaaaagatctgcttgtagcaaaaagaacagatgtcaaaactaaaatctggagtgaaaagagcaagcaacataatgtctgaaaacatttctatacagtgtattgagaaagcctgacaggaaaaataattcatttcttccctgagacatttattcactgtctttttcttttcttgttttaaggcaaatgattgactacacagttgtaaatttcagctgaaaagatgtctggaggttgaagaaaaatacagtgagcttattgtttgaaaattcaactaccatattgtttaaaaatcaaaaagttcccaaggtttccggaattttcagacacgaatgtaaactaactctctcttacgtggctctgtattagctacaagctcatgtctatgtatgtaagagtaatttttatgtaagagtaatttttaaaacatctgggagactgaggaggtatgaaaactaaaggcaatgtggtaacttggggccggatcctggaacaaaagaggacagtaatgggaaactggataaaatcccgtgaagtttgaagtttagttaagagtaacggaccagtgttggtttttagtggcgacaaatgtcccataacaatgtaagatgttaacaatagggaaaacggggtgagagaaatacaggaactttttgtactatctttgcaactttctgtaaatcccaaactagtctcaaataaaaagtatatttttttaaatatggaaggttctacccagactcagcaacaggagaggcccagagagggagagaggactagacttcaggggctgggggagggttaaggggcttcggtcttacctataacaggataaatatttgtgttaagtcgaatgtattcagctattccttatgcaattcaagttaacttaaaaaatattttatgaaaaggagagctacagctatctccttgatttgaggctgtctttactttttctcctaaatcacagatgctcaatggagctggaaaacctttgggaccaggaggctgtgacatctgaccctggctccgttctgtccaggctgtgggacctcaggggaaggtagagacttcataggcctcagtttctccctggcaaatgaaattactaagcccaccgacccccgtcttccagacggggaatcccggggtgggtggttccagggcatgatcaagacatcccccaggggctctacactccgctggctcaacactcccatctgtgtaatgggttgaggagcgaggctatccctataggactgccgaaagcaaggcagggtttgacagcgcgtaggtgggtgccaggtgcaggcagaggctggagagtggagagcgcttcttccacccgggccacgcagaggctgtccccgcacggctccccacccacaaaccctcggtcctcacctgaaaccccctcctaggtccctgccgtcgcgctaagggccagactcggacttgtcgcggtgggcgattcgccccgggggacctaccggaccccgcaccttcccaccttgcaccttcttggcagggggagcacggcctggccccctcacccacgtgcggggccccgggactcccacctccgagggtctcgccttgcccgggatactggagcgggactcgggccgggccggccgcgggctccgagacccttgggctgcagcccgggcgggagccgccccctttgtctggcggggccgagcggagcaggacactcaccgcgtgcggcggcggctcagtagcagcagcagcaacagtgcggccaggaggccgaggagcgcggcccaagccatcgcggggctggcggggctggcggggctggcggggctggcggcctggcccactcccaggtaaagttccccgcccccacccggcgcgcccctcccactccgcccaccccagcccgctttggggcggggtggggggggtgggggatggggccctccgaggtccgcaggggtcggaccggggcgctctgttagaaaccctgctccccccagctcaggcctgatggaaaatgtgggagggaggggaggggagaaggagggggagggggagggggcggaagggatgtggtgggctggggagtgatcaaggggaaaggagatagatgggggactgagggggatgtggtggactggggggtgatggaagggaggggagagggagaggatttacaggaaggaagagattatatgcggggagggaagagggatggggaagatgggagaggacttttggggaagggaagaggagggaatgtgggaagacggcgggacgatggggaaacagccaaggaggtatggggaggagggggcacagtgggaggagaaaatgtggtgggaggggacgaacatggaggaggagtgtaagggggtcaggaggagctttcccaccacattccacattccacctagacagaggaaaccccccaaggctcctcctcaccccatcccccaccccaggcgtgctggggacctggagttttccattctgtggtctgggctgggagggctggtctggattatatcgcaccctatagtatcttcagtaactactgggcagggggtacaagggtgtctcagggagtcccctcatcctcacctgctttggggacagatagtgcccgtgaagtatgcaccctctacctggtgcacgttagggcctccggatgtggtggccattgtcatcgctacctggtgcttggggtgccagccccctgtgcccgcggctctgcaatgtaccaccccagggtgctgatgagaactgggggtcaatccagcctcactccacgcccctgcccccaccatccccattcccaccctgggaagcgttgggcaggtagctcaacctctctgagctcacctcattatctggaaacagggagggcagagttgtgcttacctctggggctgttgtgaggaagtgatgagagcttgacactaaaaggaatcacaaactgttgagtgcttggcacactaagttttatgaaaccatgggctgaacctggaggtaagacccaggaggtcttgttctagtcctgtatccacccattcagtgccgggtgagcttaggcacgtttcattccatagtcccagcagagctctggagaagctgttgctcctcctggtctcctggcttccatccttatcagccagggtcctgacaaggcccttcgagaaccagcatgatccgccccttctcacctttacctgcctgaccctatgcccccgactctctccctcacccactctgctccagccacactgatctccccatctttccctagaggtcccactgcagggcctttgcacgtgctgttccctctgttcggagcattcttcgcacagcctgctctttccaccacctccccggtgcctctatctctgctcagctgtcactgcagagaagctgtctttggccacctggtctaaaacagtcatctcctcttactgatttttgtttctttgtttttttgatagtttttttttctggcagtacttcacatgtcctgctatcatactcaagattcattcatttgcctgcttaatgttggctgtcgaggcagctggatgacccccttgtggcctcagcagattcagaacagcaggaggcaaaaggagttttctgatcctcttgtttatttttccagcttatctgccagagaagccaacaatcccaagaaggccatagaacgggtccagaggattttctccaaatttggggagctccaaagggctgtctgctagcagtggggttcacagctgggcttggccgatcctcagctttgtgaccccaagcagactgctccacctccctaagctgaggttcctcattgacagaatggggaaaagagaacctcatggagttgaggtcaggaacaaacgacctggtccatggggcacacctatgtgagtgcctgtcacaccatgagcatcagggaaagttaaccgcaattagcgcttataccagttccgctcctctccattatctgtgatcaggcttggtctcaattttcccatctgaaaaatgggaagaacagttccttcctcatggggctgctttgagaactgaattaaatgaaaagagaatgaaatcacccagcacagggtctggtatacaataggtactcaataaatattagttcttctactccccacccctggcttcagtgcagaccaatatcacctcaatacaaatatctcttccagatactctcttcccttctcgacccatagacaaaatcctcccagggaaggagaggcagctgctcacacaccaaagggagatgaatgtgagcctctggttcttcctggatttgttcaggagtcggcatatgtttaggaaggtggccaggcccccttcccagagaatgacccaccatgggtctgagctggtccaggaaatccacctttgctagtgatttgtcctgaggtgggcaccttccagatatctgttgcgggcttctagaaaaatgtgtttccttcctatttgccttctcttctgctttgggggcaatcgtgtgggaatgtgattagtgggggagctgaggggggctgtagtgttatgagggaaggccaagaaaactgcagagccccaaaccagagctgcggaatcaccatccctggaaccacctgcctatagatttctcatttaatgagctaaccacacgtctgtgctaggacaccatgagtcagatttttctaatacttgcagccaaagacattcccaactgagacgccttctagatatggctgaagggaggaccaaatgaggcaatgatgcatccggagcacctctgcaggactggcccatgcgagaattcaaaagtgttgctttgttttattatttttactttgcttactgtgtaagctttctatgtttatcaggctgacaggacatccaaccctctggctatggcatcttggaggaacaggcaggccttgaaaatagcagaaattccgaattcccctgccccgggaggactcaaaggaccctgctgaggacagagctgatatggcctcagaataaagatgagggaagaccatcccaaggaagacccctctagcccatggcaaaagggctggaatacgcaaggatttgaaaagcaagttttgctttccatataaacctaagcaagtcgcttaatctgtgagcctcaactactttacttgtgcaatgggcatgttgctggtagtggtgatagcagggagccaccgagagagcttccaagtgtgccatctaagccctcctctggggaagggaagctcctctggggaagggaaactggacccccgggaaaatttattctcccagggacgaacatccagacatttccctgtaggagcctcagtgtgttcagatgttcactgtccagtagaaacaagacatctaggcaactctcccatctcaccaagcctctgctctcttctgtggccactgtggggttgtgagagtaatgtcaagacccaacccaattagaacacagggaattttgcctgggaaagggagcccttctaccctacacccctgctttctctcttccaaggatcaggtctgattcatgtctgcatcctaaaggctacaaataaactgtgtccggaaaggaaaatattatgtgtattgccttcttcaaggctaaaaaccagtctcaacagagaggggcagttttaaatatttttttgtaacaatagttctaactttagttagtaactgaagccatctgaaacactttttcataataatttatttattccccacaaagaacctataaaatgggtagtaaaattattccgaattcacagatggtgaaatcaaggtccagaaagagtcacttcacccaaggtcacgtagtacttcctttgataagctagagcatgggaatttgatggcttcttaggacaagctaacttactccctggtgctgcaaacacaccctgggccttcccacctccacacctttgctcatgctgtttacctgcctggaagccctctctttctctaccttttgatttttccaaatcggttaggagcaggttctccaggagagccaagatgagatgagatatactaaaggcttattgagggagtgccagggagtaaaatgaagagggagccagagagggctgggagaaagggacagaaaggaggacaaatggaaggaagggacagaggaaagaagggaccgtgggctgcagtgcattcttagaaaggtcaagtctggccgggcacagtggctcatgtctgtaatcccagcactttgggaggctgaggtgggtggatcagttgaggtcagaagttcaagaccagcctgggcaacaaggtgaaaaccccgtctctattaaaaatacaaaaaattagccaggagtggtggctggcacctataatcccagctacttgggaggctgaggcaggagaattgcttgaacctaggaggcagagattagagtgagccgagaccgcaccactgcactccagcctgggtgacagagcgactctgtcaaaaagaaaaaagaaagaaagaaaaagaaagtaagtaagttagttcaaggctaacaggttgtccttgagcctcctgaggagccctatgtctcccaagaacaagtctgcttcccccagtgattggctaggagcaaaccctgggaagcatggcatatctgtcaatcaggctccaccaagggaggtcccagaggtgtgttttcatggctgctgcagctacgaaaggaagcacagctgccgtctaaaactggaacaatgcaagaataaattcttccacttacagaagctaaacgaggttgagaggtggaggggaaggagagacccaaaccgcaacgtttctggtgtttttgtgctgctaaagagagagtggtaaactcaagtcttcgagcaagtattgcaaatgaatgaagtgagccagtcatatcaggaaggcaacagggagggatgggaacaatggaaaactagagagggctgccccatccaaaaggaagcagcttctggcagtaccagccaactaaagccacgtagaaatacatgcctagtgtggccagatctttagactcaagagaagccagaaataatggctccaattattttaaaacgctgcatagaccaacagcacacacctgcccccagatttttagccctgcagtctagttgtgccaagggccagtggtttaaacatttggggtatgtaaaataggtttggagttgggatgttgaacaaaattgctctgtagaattaaggaaggacaacagagttttagggggcagcctgaaagagggggcaaagaccaggccgacatgagcacagattgggggcctgtcccagtgtgacatcctctgtggaattaggagccaataaatgaccatttctattggtgatgtgtcatactgagtgtttagttgtttgctgtcttgggctgtggaataacaccacacatacactcatatacatacacacgcacacacacacatgcactactctcacatacacactcacatgttgccccagttacccccaaacgttcagaaacaatctgctacacacgtcaagtgaccaacgcatcctggtttgcccagactttcccagttttagcactgagagccctgcatcctgggaaacctctcggtcctgggtaaaccaggaaggttggtcacgctatcaccacacctcagcgtagcgtgtgagtggccagagattgggtcagagctgtggcagccaccttggagcctgaggagaatctttgctaagtcacacaattaattagccacccctggaactgtgctgcagtagattagatcatagtctccaatttttacccactccctgtatcagaattagacattcacgcccttggctgcagggttgcggtgcctcccactatgagcagagaatagtatctccctgactcagtgatggtggactcgggcctgtgactcaatttgatcagtggaggatgaagaaatgaccagttgccagttctgagcagaggtttcacgaggaatcacatatttccacttgaccttggtttctgccttgagccatgacccacagggcaaacctgagctcaacctgcagcctgaagtagagaacccctagctgacctgcagaggtccgaagaagaaaaatgtacgtgttgttacaagtcatggagattttgagatcttcttaagcaacaagaattgactaatgtatactttatctctgaactttttagaatccttttggttgaatgttctttgtaccagttaaattagaataggctgctttctactcttggagccttggtacatctgtacaagaggatgatgacgacaaggcccccctcccatggtggttggacgaattcaagaagatcttgtgtctagtgcatgcagtaggcacttaataaaagagatgatgctaggccggctgcagtggctcacgcctgtaatcccaacactttgggaggctgaggcaggaggatcatgaggtcaggagttcgagaccagcctggttaacatggtgaaaccccgtctctactaaaaaatacaaaaattagctgggtgtagtaggggacacctgtaatcccagctactcaggaggctgaggccggaaaatcatgtgaaaccagaagggcgggggttgatcgcgccactgcacttcagcctgggcaaaagagtgaaactctgtctcaaaaaaaaaaaaaaaagaaaagaaagagagatgaagcaaggctgggctcagtggctcacgcctgtaatcccagcactttgggaggctgagatgggtggatcacttgaggtcaggagttcaagaccagcctggccaacgtggtgaaaccccgtctctactaaaaatacaaaaattagccaggaatgctggcgtgcgcctgtaattccagctactcaggaggctgaggtgggaggattgcttgaacccgggaggtagaggttgcagtgagccgagattgtgccactgcactccagcctgggcgacggagtgagaccctgtcttagcaacaacaacaacacagcagcagcagcaacagcaacaacaacaaaagagatgaagcataattctttcagcacatattaccaagtatttatttgccaacactgtgcaggcctctttatcaagaattttactgaagaaatgaaagacagaaaacctcttcacttggtcttttttatacatgaagagaaagcaggtctgaatcagaggcagagggttggaagaaatgacctgttttctgccatctgggccttgctgctgactgtctctaagaatttgcacaggcctgggcctttggagatttgaaggtctctaaagtgcaaggatgtcagctgcaggggagccatcctccagcatccttccccaggagagccaggattatgtagggaatgtgcttggctaagagcccagaggtggggcagctacccagatgcaaacatggctgggccaggcggcctttcgttcagcgttcccaggctaattccacctagaccttgtcttagcctgtgagaggatgttctggagtggtcttgcccctcttcccaggctatctgccagaggtggtgggtgctacaggagagggactccagcaagcttctcatcctttggttttcccaggacgggggacaggtggcctcacggctcccaaccagctgccttggcactttgtagtggaaaaaatgatgaagtcagacctcagtctcctcaactccctgctgtcctgcctgagagccagcctagcatggaaggcaaggagaaaagagacccatgttgatctgtcacccagacagaccctgagtgatgatgctcctgccaccctgaagcaccccaagaacctcagaacttctggcttctcatcttgaaaatgggacagcagtcatagctgctttgcttattatgtcaaggagttactaaagaggatccagttagatagtgggggtagaaaaatggctgcctaaggccacatttaccctctccttctagaaattataccagagcatcaagaataatggaaaaacaaatatacaaaaccaaaccacaaactccatttttagcaaagccaggagagacatataattcatcggcttcagagtacgtgtgaagcagctaagacagggcagaagccacatgggagtggtgagtgggctcagtgatagcaaatctcagaaagcatcagcaaaactacacttcctagggatgagggcttgccatgagatgaaagttatgttccttctttataaaaatgaatgtagaagcttgggtgaatacgattagcagcagaagctctcctggatctcgtttggttcagagaaacagaggaggtatagtgaagaattacagagagaagacatatttgcaggaagcagtctgtctctatggcagcagaggagagccacagttacagagcccatgaagctaccctaattcttccttacacccataggagcaatcagcaaaatacctgacccaggaaaaccaagcccttccaatgacaagcttttgaaaaagtgtaaaagccttgatacaaagatattatgataaattatgaagagcagaaaaatctaccaatagatgaaagtgttaacacaaaatggatgaaaattatatccaaatcatattggcataaattcaaaaaagaattgaatggaggctgggtgtggtggctcacgcctgtaatcccagcactttgggaggccgaggcaggtggatcacctgaggtcaggagttcaaggccagcctggtcaacatgatactctcgaggctgaggcaggagatcgcttgaatgtgggaggcagaggttgcagtgagctgagatcatgacattgcactccagcctgggcaactagtgaaactccgtctcaaatttaaagaaagaaagaaagaaacatcttaggagaactgaatggagcaactacctctgtgaaggaggacaataaggaaactgaagaactcaaaaagaaggcaggcaaaaggaggtaatgaacatgaagggttagcactcaggaaagaagtagaaagaaaaaaaaatatcagaaatgaagacaaaattggaggggaaggaaataggccctgcagaaaatacagcaaggacacggttaacagaaatggaaaaagaggaaaaaaatgagacagaaataaagaaaacattagaaagactagaaagaaaattggctgggtgctgtggctcatgcctgtaatcccagcactttgggaggccaaggcaggcagatcacttgaagtcaggagttcaagaccaccctggccaacatagcaaaaccccatctctattaaaagtacaaaaattagccgggcatggtggcacacacctgtaatcccagctactcgggaggctgaggcacgagaatcacttgaaccccagagacagaagttgcagtgacctgagattgagccactgcactctagcctgggcgacagagcaaaactctgtctcaaaaaataaataaataaataaaaataaataaaggtgtgagcatccatgcaccagataacacagcaacagatagttacagagcaaggacattttaagtcacttctctcagctcttgaaataccaagggaaaaaaaaaaggaaatagaaagtcaaaataacatagtgaaccacaaacactggctacctagtaagccacaaagaacatggcaataatttttttaaaagcagaataaaagtacaatagtctcagatcgcaatgcaacaagcctgtgtgacctccattcctctccctcccaccccagcacctccccagagggcaataatcccccagccccacttcaccaggcatcagctcctgtgtctgttccatgttagatcatgttagatctcatcttggccagacacggtggctcacgcctgtaatcccagcactttcagaggccgaggcaggtggatcacctgaggtcaggagttcaagaccagcctggcctacatggtgaaaccccatctctactaaaagtacaaaaattagctgagcattgtggcaggcacctgtaatcccagctacttgggaggctgaggcaggagaatcgcttgaactgggaggcggaggttgtgagctaagatcgcgccactgaactccagcctgggcaacagagtgagatgctgtctaaaaaaaaatctcatctcaaacacacaaacatttcactgctttaaaaaaaaaaaaatagaaatctttggtggatgttcagccacgctcatggttcacagctccaaactctgatgcacaggcaatcacatagcccaaatgtctacatgtcctgcatgtccgcagagggctagagtgagagagcctgggctccacggccagactatgtgaactcaaagcctggcacccgcccccccacttaaaaggcctcaggcatattgcttatctgtgcctttgtttccccaggtgtcaaatggagttggttgtgaggatgaaaagagttaatctctggaagtatggaaagccttggataaatgtgggctattagcattattttcacagcctcccaacctccctccactaataccagacacgctggagagagttctctgtctccctaaccatttatttggtgatcagaaggaccttctgcctgtgatttctgacctggcaggatactgggggaccacttttgcctctgcctggagatagcatgtctgagaatgaaaccgacttacagggcagcagaaccaagagatagggaaatacagtttcttgagatatcatttgaacccccggattcagccatgcctgaagccagaatgctcctgaccacatgaaccattaaattatttttgtttgcttgtttcagccaatttgggttgagtttctttcacttgcaatagaagaaagttctccattctgaagctgaataaggtagtatgtgaagtacttgtttcatacctggtgcttaatggatgaaaccttattacattctcatttcgtaaaccttctccagggctttctgggaggcaaccagatatgaattagagtgacacagctttgcactccttgcccagcctggataagatgccccattcgcagcaagctctatgcagtcagggccagcttcatggacatgcaacctgggtgctcacataggcccctgcacccagaatggtctcatgctcggcttagcgctctcctgtcaccagcttgaaattcttaattatttttgaacaagggtccccatgattttactttactctggtacccacaaagtatatagctggtcttaataccagtatcatctccactttccaggtgaggaaactgaagctcaaagaggggaagcaagcagcccaaggtcacacagcaagaaaggggtggagctgggaatcaaattctgattctgaggcccaagttcataactgcgatgtgccagtgcctggacaattcctcatatgtggatggcacttcacagtttatactctagtgcatagcatttgaccctcataccagctttagaagcagaaattgtcatgctggcatcaggcagagtacttgggtttgttcaagcctcagaaaccaaccctggctaatttaagaaaaagaaaaggtggggacgaggtattggaaggaaaagttgaccagctgggacttggaaaggacaggaacaagcagctccgggaacgcggggagcaggagccaggggtgtggggagcaggaaccagtggccaggtcttcggggctccagctgtttccaatctcagcattccttccgcttcagtttctgattctcccacgagaaagtctgattggccatgtttgggtcatgtgcctgcccacagaccttgatggtcaaccaaacaaggtgggaaggatgatcccccaaaggcgggtcagaaagtggggtgggagggctgaaagctgggcagggacggctgtgtgcgcattttacagatgaggaatgggaagcccagacagaaggcaaggccacagaaccgggaatggtggagtctgggctccagtcagaggcccaggctgcctctcttcactcccaggactccaggctggcaggggaacaggagggcattgttctccctgttggagtgaatggccgcctcctgggaaacccaggacccagatggggtctccccagggcgcaggaaactgcctcagactgagctgtattcaggggtcgaagcctcctccccaccctccccctacagtggacagactcccccttcaaatccaacctcactgctcagctctagccctatggtttttaagagaagctagtgggggaaaggcttatttttccaatgtgcattttttccggtatgtaagatactgtgtggaccaaataaaatatgtccagacctggaaacagcccaagcatagctagtttataagtcctggaatgctccttcctgcacacaaaaattaagggtctgtttacatagatatgctagtgtgttggagttgaacttttccttactctgaactcagatatgcaaagaaaaatgagccttttacattttccatggatgtcatctagttcagtgattaggagcaagagacatgctggagccagagaacctgggtttacatcttggctttgccactatgtgacctcaggcaggtcacttaacttctctgagtctcagtttcctttaagggacatatgtacacacgggtgtggcatttaataaaaaccacaaaagtccctgctactgctctgtgtccatggtatgatgttggtcatgagccctcacactggaagaaatacaaaatcttaagccaggctaatcatttaaactgtctatttaggcaagacaggcttcccctggggtatttcagggacaaactccattgatcagtttcccaccttcctctgctcctcttcaagaagcttctgcctgaacaccactttggtaacagggaaactgagctccgaggagagaggtcaaggttaggaaatgtcatttagtgagtgtcccttctgcacaaagccgtataggtacgcaagctccttgaatcctcataaccattctggatggaaagaatcaggactcccttaaccaacattgtggagcttgcaagtaacggaggcagcattagattccaggatgttcaacttcgaggcctgccttttctctgctcctattaactgtgtattcccattcctggtcataaggcaagattcagaggcatctgtgctccaattgaccatggcgcttgatcccaaaaggaaaaactctttctctctctctctacctgattaacaataataataacaataatttaatggctcaagcagggaaagtccagtggtgggaaatcctggcttcagggaactgggaagaaaaacagcttcaggaatggcaggatccaggggctccatggatgttgccaggactcacttctctctctaagcaatgctttcctttgtattggcttctccctcaggcagcctctccctgttttgtatcaagatagccttagcagtccttatgccctggcagcttggtgatgccagcagaaggagactctgggactaactctggttggccttattaaggtcagatgcaaatccctttacttctttctctagctcatatcggtcaggcctgcgtcgccttcccacttctagatctggaggtagagactagggtagttttctcacattgatgccctaattaatgaccttcctgcatccgagccctttgcagtgtgagtttatttccacatgatctgaatctgggcttggccttgagacttgctctgaccactggaatccaagggaagtgatgctgtgcctgcttccaacctaggcttcaagagtcttcttcacttctcccctctctgttggaactctggatagccaccatgagaacaaacctgggctagccagctgcaggaggagaaaccatcttaagaagtgcctggtcccccagcaaagactaacagcgcaacagccagctgacctatcagagtttgttttttaagcaatcttatctaccttcttgcaggactaggattgacagatgacaaaaaaaaaaaaaaaaaaagagttaaggcacatctgtaaagctagaaattggaaggctgctagggtttgaatcctggcatggccattccctagctattaggcttagtttcctgtggctgttataacaaattgccacaaactcgatggctcaaaacaacagaagtttattctcacacagttctggaggccagagggtgagcatcagtttcactcagctgaagtcaaggtgtcagcagggccatgctcccacagaggctctgggggacaaatcactccatacctcttccagctgctggtggctgccagcattcctttgcttgtagccacatcactgccatctctgccttggtcttcacgttgtcttcttttctgtgtgtctgtccaccctcccttggtcttcctcttacgaagcatatgacatgcatgcttttaatacatgtgataacatttagagcccagcaagataatcccagataatatcctcatcacaaaatccttaatttgatcatatttgcaaagactttaccatataaggtaacattcacaggctcctgggattaggagaacctgatttcttagaggtccaccattcagcccactgtactagcatgtggctccaagtgagtgtcaacctcactgtgcctcagtttccttatctgtaaaatgacagcagccacctcactgggtaattatgaagatttaataagtacttagaatggtgaccagcacatgataaaagctttgtaaatgttaaccttcaataatatcaagggtcggtcgggcgcggtggctcacacctgtaattctagcactttgggaggcagaggcgggaagatcgcttgagcccaggaatttgagaccagcctgggcaacatgacaaaacccagtctctacaaaaacaaaaacaaaaacaaaaaacctagccaggcgtggtggcatgtgcctgtagtcccagctacttgagggggctgaggcacaagaatctcttgaaccctggaggttgaggctgcagtgagctgagtttgcaccactgcattccagcctggggggcagagagagactctgtctctaaaaaaataataataataagatttgactgtgactgaaattcgcacaagaacaaatcccttctctgtcctgtttgctcgcgcctgtcttcatagcacccaccatggagacttgcacatagtaggtgctcagtaaatattaaatgcacacatgccactatgtagctgtgtggcttcaagcaagttgtttctcctctctggtcctcagtttccttctcccttcacgaagagcttcttgtagggaaagtccattcctctttctgggagggtgtgtccccatcaggggtagagggttcaggggtcaggagccggccacagctgctatctccctgagtcaccaaatttctcaacttgaggccaagtgtctaaatattgtgactgagccagttagagataagatgtggaaacattgatttggcccaagcaactgcagtcacggtgctggagccagacctccctggatcttctcagcagcatgagtgagtgtttagcacctgccaggaacacaggctgctgacctgcaaacagatggggaggcccagatgcctggcttggcagcaagagcctgcctttgccgtctctgtttacacagccagcatccagtcaaatctctgtggctccagtggagaaactaaggcccaaagggagtgaaggatgtgtcgtccagggttacgctgggagactgctatcccatgaagctaaaacccgcaagtcctaactcccagcccagcacctgtgggaacccaccaggcccagggagaaggaaggctggcagcgtgtcacaggcagggagcgtgcctgagcaaatgctcaggggtgaaagaccagatgcaagctcaaacactagagtgaatgggagaaaaggccacgtgtccaggactttggactcaattcagagaataaaagggaaccatcgatggttttaggaagaagagcagcaggatctgagaggctttttccaagtgcttatagaccaccagcatcagaatcgcctacgacaggagctgggggaggttgtcaaaatgtgggttcctggggtccaccctagatgtggctccccattgtagcaggccccctctgaggggattctgaagcacacccactgttttagtgagtaggagatgcagctaacatcccacttataaggtctaatctcagacaaacctggtttcaaatcccagctctgccacttacttgctctgtgattttaggtcacttacgacacctctctgagcctgttttctctcctccgtaatgaaacaatcttagcatttgcctcaaaggtttgttctaaggattcaataagataatgtaggtaaagtgctctacatagatccagagccctcctagtgctcaaaaacactggtttttagagattcccttgggcagcagtggggagaaagcaatggaggagggcaggcaaggaggcagggaagccagtgaggaggcagcagtgggactccggggagaggtctgtggctagggtgtggacatggtgacgggtggggtggctcctttgcaccgtgccaggtggtgccgatcttgtatgctcgattgcgaaagaagctctctggagttggtctagggcaggagagaagaggatgagcaaaaaaaccaaaagaggttgatcataaaacccatattcgcagtcacggactgggtgcttagcgtgggccaggccccgtgttagctgcttcctgatcttcatcctcacaaccacctgacagtgtgggtagcacttcatcaggggttgttaaccccgacactagtgacacttgtactggataattccttaattaaggggctgtgctgtgcactgtcaaatatttaacaacacccctggactctacccactagatgccattaacactcccaccttccagttatgacaaccaaaactgtctccagacattaccagaggtttcccgggaggcaaaatcacccctagttaagaaccagtgctttattctccttttacaaggagggaattgaaggctcagagagccaaagccctttgcccacagtctcccagctaagaagtggccggatttgaactcaggtctgactcggagccccggatgttaacctttgccgtgaaggaggccacatctatgcagtggcaggcccagatggtctatatgggggtcttggggacagtggtcttttccgaaggggcagctggaaacacctgctaagcagatgggctgcgtgagcgtttgttgggggtggttgtagaagcgatgatggggattatgagagagccaaatccccctccagaggctaccaccatttgccctggacagagggactgagggagatgggacgtggagggcaggcaagaaggaccaaggtggcactgttaggagaagctgggtgaggtcatctatgcctggagccccactgccgggagcctcccaaaaacactctccaagacctttgggctaaatatttatcctgtgaatgctcttttccttcctgcatggggagtggggctttggaggtgggtccaagaaatttggggagacagaatccagagaaagaggaaggggacaggccagaggtcagaggtcaggagaaagtagtcagaggccaggaataaacattcatcctggcatctaaagccttccagagtgagctccactgccaccacagccatctcactcagggaggcgtagaattcaaaatatgtttttgttttcttaagagacatggggaataaaattacaattttttttttggtccagtctttttttttttttcttttttgagacagagtctcactctgttgcctaagatggagtgcagtggcgcgatctcagctcactgcaacctccgcctcctgggttcaagcaattcttgtgcctcggtctcctcagtagctgggattacagccacccaccaccatgcctggctaatttttgtatttttagtagagacaagatttcatcatgttggccaggctggtctttaactcctgacctcgaatgatctgcccacctcggtctcccaaagtgctgggattacaggcatgaaccaccatgcccggctcagtcttgatatttttaagcaagggagttggaggtgaagggaaaattaagtcaaaaaatcttacccagaggacaggtgtggtagctcacacctataatcccagcactttgggaggccaaggcgggcagattgccagaggtcaggtgttcgagaccagcctggccgacatagtgaaaccccatcactactaaaaatataaaaattagccgggtgtggtggcgggtatctgtaatcccagctactcaggaggctgaggcaggagaattgcttgaacccgggaggtggaggctgcagtgagccgagattgagccactgtactccagcctgggtgacagagcgagactctgtttaaaaaaaaaaaaaggctgggcgcagtggctcatgcctgtaatcccagcactttgggagcctgaggagggcggatcaggagtttgagaccagcctggacaacatggtgaaaacttctctctactaaaaatacaaaactaggcggatgtagtggcgcacacctgtagtcccggctactcaggaggctgagacaggagaatcgcttgaacctgggaggcagaggctgcagtgagtcaagattgcaccactgcactccagcctgggcaacaagagcaaaactctgtttcaaaaaaaaaaaatcttatccagagaagaagtcatttttttagacacaagaatactttgtttatacagatggttgctataaaaggcctgactttgtgccgatagagaagatggatttatggtgaaggcagctcctgaatgagctcagtaatcaaagtcaaggtcctgccaggttaagctgcagcaggctccgctccctaccaaaaatgacaggctctgctccatctgatgggttctgctccagatgatggaactcataagggcatcatgctgtcaaacggttttactgccaagactgttgttcatgtgtccaaagcatcacgtctaacctctaggttacgatgaccccagagcttgcaaatcttggtggaagaattgcacggagcctgaagtatgtttttcatcggaaatggtgctcattaaagaaatacgtgcctgttagccatcacttggattgtacatgacatcgttgatgttgcgtgtgtgtgtgtgtgtgtgtgtgggtgcacgcacgcacttgtgtgtttacattttcttttccttctttgttcctccactaaagcagaaaaagtgttagaagatgtttaagagagatgtggaaacagagagaaatgcagttttatccactcttctctcttgtaagataaaaaatgtgtctctgggcagggcgcggtggctcacgcctgtaatcccagcactttgggaggctgaggtgggcgaatcatgaggtcaggagatcgagaccatcctggctaacacggtgaaattaaaccccatctctactaaaaatacaaaggattagccaggcgtggtggcgggcgcctgtagtcccagctactcgggaggctgaggcaggagaaaggctgaacccaggaggcagagcttgcagtgagccgagatccgcactctagcccgggcgacagagcaagactccatctcaaaaaaaaaaaaaaaaaaagtgtctctgggtgtttttaagccaaaagccattcttcaccaggagggcttgtgggaaagcagattctgactcagtaggtctggggtgaagcctgggatgctacttctccaatgcactcccaggcaacgcagcagccgccagtctgggagccatgcctgggagtggtggggccttagcacacagtgtgtgtccctgcctctggacacctcctgccatccctgctcttccctcccgctgctaagtctcgccctggtctccctgccttcttagagatggcgcttcctttagcaagtgtttgctccacttaaggattcagggaacatccgggctggagagatgctggagaccatcccgtccaactctcttcagttcccagttgcttttgtggcaagagctaaaaacccaactcaacccacacacgtttatatagacttgtggaaaatacaaagggctttttttttttggtgcgttttaaaatataaatggtatcatattgtgtgcgtcattctgtgcctgtttttctctcttagtaaccaatcttggaggttttttaggtcagcagagaaaaacctccccattaacagcagtacaacattccaggatctaaacaacagccttgacattactgacatttacggctggacaattctttgctaaggggctgtcctatgcattatagaatggttagcaacatcccaccggcatgattccagtagcacccctcgcccccatcagttgtgacaaccaaaatgtcatcagacattgctaaatgtgtcctgagaggcaaagctgccctggttgagaaccatggggataagatgtagaagagcaaattccaaagaggtaagatgagttacttcctggggcacaaggaaggactggaatggggatagagagttctcattctttatgacttcattcattcatccatttcatacatatttattaagcacctgccatgttccagacaccatgccaggtgctagggaggcagcagggaagaaaacaagccaataccttcctattgtggctctgccattctccctggggagacagacatgaaacaaacaaggaagacatcagtacggaagatgtgctaaaaactatgggagaaagtaggacaaggggagctgggagtgctggggcccaggtggggacttcagagcctcacatatgatgttttaatgtattaaaaggagaatatctccatgagttatttggatgatttaaaatttttttattacttgagcctaggagttcaagaccagcctgggcaacacagcaagacctttctctgcaaaaatttttttttaattagccagatgtggtggtgcacatctgtagttccaggtacatgggaggctgaggtgggaggatcacttgagcctgggaggtggaggctgcagtgagccatgatggtgccactgcactccagcctgggcgacagagagagaccttatctcaaaaaatattttttttttaagatggatgggctaagccagtcccagcctggctccctgaagcaaggagatctttcaaggggctgaacccgggtgcctgggcagcagctggcctcagccccccattccttccttcaaatccccttgcttaggacaataaactcctcaacaggtaccctcagctgcacttgcatggagctgcaccgccatcccaagagctcgtggtgggcctttgaggcaccctttctccatctgtgtgggttcctccagcccattgttaaaagatagtagtaatgtctaacatccctgtaaaaaaataatccccatgtttctcgaggccctaggtttctggtccctgctccctctctgactttttctcctcccactctcccccaactcactcagctccagccacactgactttctttctgctcctcaaacgttcaggctgggtcctgccactgggcctttgcacttgctgttcctaatgccaagtctttccccatggtctccccacagccagcttcttatcaaccaagtcccagctgacatgtcgcctccgcagagaggacatccccgaccaccccagccaaaggaggccttttctccaaatctccttacacgtctctctcacatgtgtgtttctgttacagtttgaatctgtgtccctgcccgaatctcctgttcaaccgtaatccccaatgttggagatggggcctggtgggaggtgattggatcatgagggcggtttctcatggtttcacaccatcccccttggagctgtcatcccaatagtgaattctcatgcgatctgcttgtttgaaagtgtgcggcacttcccctctctctttcttcctcctgcaccagccatgtgaagatgcctgtttccccttcaacttccgccatgagtaaaagctccccgaggcctcccaggaagcagatgccaccatgcttcctgtagagccagcagagctatgagccaattatacctcttctctttataaatgacccagcctcaggtatttctttatagcagtgtgagaacagactcatagtttccttcattgtacttgtgacttgatgaaatgattctgtttgattctttgccgggttgttgtcagctccataagaagaggactttatcttgttctctgtgtacaaacacatagtaggtgctctgtaagtacttgttgaacaaacatgtaaatgaatgaatgaatgagagccagtgtgatttggatgactgcgtgcatgtgctaagtaaactgttttccatgatctctggggttgtgtgtgtgtgtgtgtgtgtgtgtgtgtgttcagtttggtttttgccacatctttataccctctgttctattacaacttagcatttttctttttatataaagaaactcatttaaaggaatcttgacaatatcactagaaacagaaagccagtatcagcacatacttgctataaatagcaaaaaaaaaaaaaaaaaaaaaaaaagaaaagaaagaaagagagagagagaaagaaaggaaaaccctatgcatataaattccatgaagatgtgaaaaagttatcaaattctcacagggtatgattgctactgtagtttctaagcctgaggctttagaaaatcgatactctcttgaaaaaaaaaatttaagcctgaggctgttgtgtctttcttaaaaaggagattggcaggtgtcagagaggtgttcaagacaagttaactccaacccgaggctttctcaatgatctttctccaattcatcccaacacccacttgccgcagaccctgtggaaggccccagatccaaactcccttcctgctaacagcagctgtctggggagatttccttccagttgagccatccaaggactcctccccagcccttatctgtggaatggaaaaaatactagcccacacctcatagattaagagaatcaaatgagctcatttatagaaagcacatggaacaatgacaagcatgaaataatagtcactgatgtttactgagactaacagcatgtcacacccagtgcaaaatgcctcacgtcctcccacagagtcttcataacaacctttagctcatggaagtactatttttaccctatttggccaatgaaaaagcagaggcccaggaaggtgaagtaacttgtccaaggtcacacagcaaggaggcaatagagctgggatttgaaccccggctgcctgactccagagctgtacaaagccagataccacagaggctgggttattgttcgtccagacccatgttcccacaggtcctctcatcccttacctgctccctttctaccttgtatttctatcctcctgctctgaggagattcctctccctgaagatgcttgggcttgagggaaccaggaggagaggaggtgaagttggcctggatgactctgtggtcaggatcctaatgacccagtaattttcctccaagtccagtattctcaggattaagtcctaatcatccatctacccactcacccactcattcatccatctgtcc

SEQ ID NO: 47 - DNA, 66494 bp, Homo sapiens
  Genbank Accession No. AC006957
gttcatattggggttaccctgcacaagatgtctcctatggggtttttagccacggggtctctaatgatttggagcctcactcagaggaagccaagcctcagaatgctgtataaattggtaaaaaaaaaaaaaaatctaactttgaaatgcattcctagtcaccaggaaaacacgttttggggggagagaatgtctaacaagcctgaaatgtagacaactccttattgcttctgactgcactttctcctgggaagttaggggacaccagcagttgccatgagtaggactgaccagtcactgtctgggctgaggcagactgctttctttattttacagcagtagggaaccccttgttagacataatgaaggcagaggttgatgggcagatggagatgagaaacacaatgcctggtggtaaaaagcaggtggctcagcttagagtcatttattttaattcattcatttatttaagaaatagttctgggcactttctaagtgccaggcaccgtgttagctgcttgggacataggagaaaatgggatagacgtagtccttgacctgggggtgctcaagtttagctggggaggtggacaaggaaataggaaaccaatatgcagtgtgatcagtgctccagggggattcagaagaggagttccagggagagtggtgctggcttctggaagaagggatgtctaagccaagatctggaggatgagccaggctaggagatggggaaatgtggtatgaaggaggagaacagtcagtgggcagacctcaaaaggagagacatggcaggagttcagagtggcagcagcggggtgggggtggtggcagggagggcagggtcccgtcatgcacagctcattcctgaggactgctccctagggtgatggcaacagagcctgggactgaagagcccatgggctgagagaggacagtttggatgagagatggaggtgctcacgggaactggggctttgcatgaggctgcgggagcctggtgggagtgtctctggggagcagtgatgcagacccagctgctgcaggcctgggtactggggatgtgggtgaaggagatttgctgttcactgctttctcccctggcacatggacaaggaggcctagatgaccgctgaatccctcccagaactgctgtctgaacactgggaactgtgtgcccccctccctcccacaaaccaccccatgcctctgtctccctggcccagctctttccatcctgcagtatccactctggctgccccaggcccccttttctctatcactacccagaagctgcatcactatgaccagctcatgtcacatctccgggcctcagtttccacattagtgggaaactgatgggaataataacaccacctacttcttcagccttgtcttctgctcattacccaggcaaccctggcccgctgtcactacctcaagctcatggggctctttcttgcctagagttccttgccttttccttccttccaatccgtctccccacttttgccttgataattattcctcatgtttcaaacccaagctgaaacgttgtttcttcagagaagccttcctgaagaggggccaccacttgtattctacatgaatgctctgcatatttccttcttgactctcaccccactggtgtacacctcacttttgcataatttctgaatatctccttccctccctaggatataagcaccatgggcagtggagatccctgacatgctcattgctatatcctttcacctggcactgtcccaggtatagattaggcactgggccatgagatgctgaattaataaacgacgaactcaatgggtttaatactctccacatgtatgtaagttactaattatattcaagccagacctctaaactaacttaaactcagtttaataacactcatttattaactcagctaaataactgattgcagctcaatttgataagcaaagaccatcacaaaattgtagtgtaacatggccctggccactagagggagctgggaagccataaagccgggtggcctctaggaccccaaccccctgtagagaggtggaagtctaatgttcagtcattttctattcaatccattctttaaagtctatagactgttatgagttggaaggctagggagagactgtttagttcagtctggacactgaggcctgagggagagcaagttccctctgcctcccagggcttcatggcatagacttgtttctagccatgacaaacctctctctctttttttttttttttcaatatttctattttctattatgtagaagagatcattttaacttctgtctgtccatatttattgactttctactatgcgctgggcactgtttaggtgctagacactctggggtacaaaacaggctcctgtctcaataagtccatcgtctagttagaaagacaaatgtcaaaaaatactacatagctaccaactgtgattggtgtgaaggagaaagacaatgtttggagacagataataacaggaacacctaattcattctcaagttcatcctgagaggaagagccatgtagcagaaacctggaggctgtgcagggctggcagagggaccagaagagcagaccttctgccccacatggctctctggcttgcccactgctgctgggtgagtcccgtctcccctgtggccttctgctttgccatctgtgtaattgtgcacgcatttcaagcctgaggttttgattaggaggggcttgtacctgagctatctggggcagctggtgtgtggcatttgcagctggtgtcaaaggagcctggggtccagctcttgagtgaaagggggcttccacatggatggcctcacactgagcaatgggccaggagctgtggggtggctttgttccaggcataggagtactgcagctttaagacctagcacaggtgtggctcttggactgcctgcatccagtcacctggagagttgcttaagtagagaaactactgggctccacccccagagataatgataaggcagctctggaggagggcccaggaatctgcatgttaatgagctgtctaggtgactctgatgcatgctgaggtctgggaaccatttccctagatcgtcttgtagaaaggatctgtgacactcaggctttgaactggtcttcattgtgtgctctatgtgtattccaaaagagttgtggttaagcaaagatattttacaattcaaatcatatcctgagtatacttagggctctcactttaaagaagccccatttgtaatgtgaatttctataccaaagtatagttctttggttcttgtgtgttaattttcctaaatgatgggcatacctaactatatactttgcagactgattaattaaataatgaattgaaaacacctggaatccagctttgtatgttgcgggaggtcagggaccccgaatggagggactggctgaagccatgggagaagaatatggattgtgaagatttcatggacatttattagttccccaaattaatacttttataatttcttatgcctgtctttactgcaatctctaaacataaattgtgaagatatcatggacacttatcacttccccaatcaatacccttgtgatttcctatgcctgtctttactttaatctcttaatcctgtcagctgaggatgatgtatgtttcctcaggaccctgtgataattacgttaactgcacaaattgtagagcatgtgtgtttgaacaatatgaaatctgggcaccttgaaaaaagaacaggataacagcaatgttcagagaataagagagataaccttaaactctgaccgccggtgaggctggtggaacagagccatatttctcttctttcaaaagcaaatggagaaatatcgctgaattctttttctcagcaagggacatccctgagaaggagaatgcgcccctgagggtgggtctctaaaacggcccccttgggtgtggccatcttctatggtcgaaactgtagggatgaaataaaccccagtctcccatagcactcccaggcttgttaggaagaggaaattcccacctaataaattttggtcagaccggttgctctcaaatcctgtctcctgataagatgttatcaatggcagtggtgtcagaaacttcgttggcaattttaatttcaccccagtcctgtggtcctgtgatctcgccctgcctccatttgccttgtgatattctgttaccttgtgaagtaagtgatcttcatgacccacaccctattcatacactccctccctttttgaaagtccctaataaaaacttgctggttttatggctcagggggcatcacggaacctaccgacatgtgctgtctcccctggatgcccagctttaaaatttctctcttttgtactctgtccctttatttctcaacccagctgatgcttagggaaaatagaaaagaacctatgtgactatcggggcaggttccctgatattgtagaaaatctacagccttcatttccagagaggggagaggagaagatctgtggcagaggcataaagaattaaatttcaaagctcagagttaagctccttcaggataaagcatttatttatcgtcaggtttataatcactgcccatctgggacaggtgagccctggcccgttgtcccccaaatgcagctaaatgtctaatgcccttgaatttgccattgctgaggaggcttcaatcccatggctcctgccaaggacaacaatctgtggggttgggaacactctgatccccctcattctgggttgcaaaagagctcgggtggagatatcttgaatcatggaaaagtcttggccctcggcaaggaatatttcattcagagcccttatctccttgacctgctgctccagtctcctggctcatctataattttcccatttgtagggcagttgcaggctggcccagggcagacccaactgagggcaatggtccttagagctatggccaccctgacgtggatgcctggtgagaggcttgtgaacagagaagactaactgtggagatgctgacccatttagcttttacctgtcccaggatggttggagatctctgggagagagagagaggtaatgaggactcagttttgaccaaggcaaggtaagtaagcactaaggtgagaggtctcttttctctggtggctactccaagtcatgccaaatcactgacccaacctgttggatcagagagaacaagcaactggatttagggcctaaagatgccctataatttgcattggtggagaggaaggagatggaattcagagggacttgggagacaaaataaaaatgacagaaacaggagatcagtaataatggaagaaaggacccatggaagagaagaagggagaagaggtagttataagtgctggagaaaagcattgcttttagtgtaattcttcattgtacatatgaattttgttgacaggtacacttcatgtatacttcatgtgtgtacatgaatattattcactctctctcctttgacctccactagagctgtaagacaggctggtcatttccgagttaccgaccgtatagtaaagatgaagcagactccctctcttggcatggctctttccttgaagccccactgtggaactccattaagaagccaccaagttgcttttggcataggtcacccagagtcactgccactccttggcaggagaaggggtactggcttcctgtgacaaaatgaagagtgtggccagggtacattaatctattgatgcattcatgaggcatcagaaggaaaagataggaggggagaagactcaaaaggaagttgactgttgcaagagagctaaggcctgtgctgtgaatgtcttatcaggaatcttattcagttggtcataggacaagtgacagagcctgtggagcagactgggcagctagctcaggacctgcaggagtagtgatcacagaacctgtttcagtaaccccctgccatcggggatgagaacatggttcctggagtcatttgagttcaagtccctgctctgccactttctagttgtgttcttggacaagacacatcatctcaatggactgtaacttcctcttgtgtaaagtgggaataataatgactgtgaggactaaataaaatcaagcttaaaaagcacttcacacaatagtaaccactaactaagtatcagctggagtcattataatcatactgagtgccatgagtggggtggcttctttgcttttgcttttaaacatgctcctctcctccaattggcaaattcttctcttgactccaacatttctgggccaccattttacatctcttccgccttccccacccaagtgaattctgacattttttttggttttgagattccatttactgaagaacaattaacctcatttttgtggacaaaggaactgagtcttggagatgtgaagtaacattattaagtggctcactgtgccagcaccgttactcaaacccagtgatgggcaatacgctcagccactgcctttaccagggatgacagacttcactagggttacagaaaagcacaataaatgccttgataggaacatgcagagggagctaatctcatgcacactgtcagaaaacttccccaggggttatccaggctgccagggatctgggattttcacagtggaatgccagggctggagggccttcagggatcatctaggccaagagttttccaacgagagtctgagggatgcttgaaggagcctggcaggtgagagttttttcagttgcaagaactatgtattcattataataaattatgaaccccaaaggttgtgcttttacatttatgaggtgatcatttccttttacaataaatacctgcaaaaagcaatattaggttaaaaatagcagctgtggtgcttatgtatggaaactcatgatcccagaaatctcatacctgaagtttgggaaactctgattttgtacaactttgttattttgaggaagagaaacagatgctcagagaggctccatgacttgctcaatgttatagagtcagttagtggctgaattttgtcatataaaaatgtatttcatttcccccaaatcctaagataagaggaaaagtgatacattgagtttcaggaggcgtttgataaatgacttgcagttctgccagcagcctgattctctgattaggatctggctgatgctttcctgttctttcaaattaatttctccttccagtctttatctgtctcccagttcccctgcagtggtgagacactcaactttggagggagagtttgtggctgatgtccttttgctctactggcccctcgatcaagaggttaagttctgaacgtcagtgcccttaccttctgctgaggaggacagatgctgggctttgagtctcatgggctctgctctgcctccaacttgtggtgtagacatgaggatccccccttccctgggctgcctaccttggagggctattatgaagggaaaatgagactgggtatttcagaacctgaaagcagtgccatcaaaggggttgtgatcagatcaatgttcccctgtttagcagcgtgaggcacatgagccgtggctgtgaaccatctgcactgaccccataacactgccagggctgaccctgctccgacccgagcccagaaacagcttctattcactcctcagcttggcctgctctttctttgaggaaaacactgccattcagaaaatactatcccatgtgggattttattttaatttttacaataagcctcagaatattgactattattgcttttttagtacataagaaactaaagtttagaccgtgaaagagatctggcccaggttacccagctggtgggtggcaatgctgggatcctggctttcagacaggtgctcttttgcagctacctgcaaggttgccagccatcctgctcagactgagagtgcacccctccttcattcctgcatttgtcatgcaaatgtcatgaggtcttcaatttgtgcatggggaaataaatgtggagggagaggagaaatggtgatgcatgcctgtaagcccagctactttggaggatgaggcgagaggatcacttgaacccaggagtttgaggctgcagtgagctgtgtttgcactactgcactctcgtctgggcaatagcgagactgtctgagaaaaaaatatggatcttgtaactatattaggaaaatcagctcttttcatacaaggggacctgtttgtgacaattgtaggcaatatcataggcaatatttttcattagaagctggatttctagaagaattcaggcagtatacattctttgcatctcatatagacattccttttatctgctcatccaattactgttattattatgaatatatatttgtagtagcgaagcttctgatgatagaaccaacaggatgtatatctacaggctacagatatctctatctctgcctctatttttatctgtacctctatacacagagacacagagagagattttagggaatttggtcacttggttgtggagttggcaaacccaaaacctgccaggttaactggcatgctagagacccagggaagagctgatattgcagtttgaatctgaaggtggtccactggcagaattctctcttccttgggagacctcatcctttttcctctgaaggctcttagctgattagataaggcccttccacaagactgaaggcaaattgcttcactcaaagtctacagattgaagtgttgttctcatctaaagaatcctttcactgcaacatccagatatgtttgaccaaatagctgagaactgtggcctagacgagctggcacctagattaaccatcacaatgtataaatatataatatgtagaataacacaaactaatctttactgaatatttattatcagcaaggaaccattatttcattgaataattcctaattatgattattgtacagtacctgatacataaatagaaataaattctggtttcaagtttagaaggtaattcagagtagagggaaggaaggggggttggcatcaggtatatttgagttcaagttctaactgccaatgtctaagttgggcaagttacttaatccctctaaatctctttttcctcatctgtgaaacagagttaaaaatagtgcccacttcatcaacacagcgtgtgcttgatacctatttattgagcaaatgaatgctgcgggaatctctagagttgttaaaagatttaaaggagataatttatctaaagctcccataaggtgccaggcacaggaggagaagatagttaattgagctgcctttatattagggttatttttcctcctgacatctgcaaacaacagagtcatggctcgctgctgctgggattcacctaacagggactcagggaaaggtgtggttttccgggaggtcttgcttctaaaggccaggattaaacagaaatctccctggtctgagtcaagggctgtttttttcttacttccttggcatccctctcagggcagccagttctcactgctccagaactcctttcttggagctctggctgtgactgggcttggcagggagccgtctctgaagaaccaggtaatgtggtctggagcctggtgagtttcctacatctctgccagcacactctgctcctcttttgcaactctgccatcagccctgcttcacaaagctcaatttactgcctcaccatagaaaatagctgcctccttctcctaagggatatgacctacccttagagactctatcagttaggctaatcactcccatttattctgaaacaacttgtactatgtatgggattaattaattatgaggacatcaagagtactataaagtgctttgtattcataattgattcatcattcaataagtattatggtgtactaatggctggaatccaagctctgacacttataggctgtgatcttgatcaaatttctatcttattcataagtttctttatctgtaaaataagaataatactaatgccatcttaaaagggttattaggatgttggagtgaattagtttatataaagcacataaaaacatatctgcacacagtaagtgctccataaatagtagcaattcctattctccacagactttattacagattgggacaagtgttctataaaagccaacaggatgctttgacacagacacacatagtgggccagggaaacaacttagaagtgcaggtaagggaaaggctcactgagctggtaatattaatttgaacactgaaggatgagaaagagagggaaaaaagaaataataaggaacagtatgtatgaaaactttgaggcctcaaataacttggcatattcatgagattaaaaaaaggctcatgtggctggagcaaagggaaggaaacaatagcagtagttaacacttacaaagtactcaccatatgtcaaatgctgtctgggtggtttatttatgtttacttacgcgatcctcaatgacaaccataggaggaggcactatcatagcctagactgggtcatgtcatgaccattcacacttcataccttcttgctgcttatagaattaagtgcaaactcttatcttggtacatcagatgcctcgaaatgtagtttcaacataactttcccattctatgtctttttttttgttttgctatctaccttgaaattaatttttacttacataagtaatacataaatatacttttcttgtaaaaactttaaacaatatagtaaagttagggttctcctactccacttctatcttaggtacctgacaaaggaaataatgcaattagtttgccataaatccttccagatatttctgtaaatgtatcaatttatatataaacctaaagattatataaaactatagaatacatatgcaattggtttattatttttaaagaataaacattaatcaaacactacaggacatactggtctgcaactttcttttttccatcagtacatattccatgttgcagatttatgtcaacttaaaaaattgctgcagagtattctgtactatttctcaaatagtgaacatctgagatatttcttttcttttttttttttttacgaaaatagaatctttattaaaatagcaaggcataacaatcactgctactcaggaaacactgtgtttattctttttaatcatcaaaatcaatgactttgggcaagacctctgaactctcagagcctgtttctccatctggagaacaggcaggtagggcattgccagctccctgtgagtgggggccactggtgggaggagatggccctggtcgcccatgggatgagaaacttactcctgcttctgtccctggagaaggtctgggagatgccagtgtggacttaaggcaatgctaacacttgcttatctccttttgtaacagagaagggagagctctcagccttggccacaccagcatggagcccccctccccagcgaatttatttttcatggtcactttctttttttttttccttttttttttattatactttaagttttagggtacatgtgcacattgtgcaggttagttacatatgtatacatgtgccatgctggtgcgctgcacccactaactcgtcatctagcattaggtatatctcccaatgctatccctcccccctccccccaccccaccacagtccccagagtgtgatgttccccttcctgtgtccatgtgatctcattgttcaattcccacctatgagtgagaatatgcggtgtttggttttttgttcttgtgatagtttactgaggatgatgatttccaatttcatccatgtccctacaaaggacatgaactcatcattttttatggctgcatagtattccatggtgtatatgggccacattttcttaatccagtctatcattgttggacatttgggttggttccaagtctttgctattgtgaataatgccgcaataaacatacgtgtgcatttgtctttatagcagcaagatttatagtcctttgggtatatacccagtaatgggatggctgggtcaaatggtatttctagttctagatccctgaggaatcgccacactgacttccacaatggttgaactagtttacagtcccaccaacagtgtaaaagtgttcctatttctccacatcctctccagcacctgtttcctgactttttaatgattgccattctaactggtgtgagatggtatctcactgtggttttgatttgcatttctctgatggccagtgatgatgagcatttttttcatgtgttttttggctgcataaatgtcttcttttgagaagtgtctgttcatgtccttcacccactttttgatggggttgtttgtttttttcttgtaaatttgtttgagttcattgtagattctggatattagccctttgtcagatgagtaggttgtgaaaattttctcccattttgtaggtttcctgttcactctgatggtactttcttttgctgtgcagaagctctttagtttaattagatcccatttgtcaattttggcttttgttgccattgcttttggtgttttggacatgaagtccttgcccatgcctatgtcctgaatggtaatgcctaggttttcttctagagtttttatggttttaggtctaacgtttaagtctttaatccatcttgaattgatttttgtataaggtgtaaggaagggatccagtttcagctttctacatatggctagccagttttcccagcaccatttattaaatagggaatcctttccccattgcttgtttttctcaggtttgtcaaagatcagatagttgtagatatgcagcgttatttctgagggctctgttctgttccattgatctatatctctgttttggtaccagtaccatgctgttttggttactgtagccttgtagtataatttgaagtcaggtagtgtgatgcctccagctttgttcttttggcttaggattgccttggcgatgcgggctcttttttggttccatatgaactttaaagtagttttttccaattctgtgaagaaagtcattggtagcttgatggggatggcattgaatctgtaaattaccttgggcagtatggccattttcacgatattgattcttcctacccatgagcatggaatgttcttccatttgtttgtatcctcttttatttccttgagcagtgctttgtagttctccttgaagacgtccttcacatcccttgtaagttggattcctaggtattttattctttttgaagcaattgtgaatgggagttcactcatgatttggctctctgtttgtctgttgttggtgtataagaatgcttgtgatttttgtacattgattttgtatcctgagagtttgctgaagttgcttatcagcttaaggagattttgggctgagacaatggggttttctagatatacaatcatgtcatctgcaaacagggacaatttgacttcctcttttcctaattgaataccctttatttccttctcctgcctaattgccctggccagaacttccaacactatgttgaataggagtggtgagagagggcatccctgtcttgtgccagttttcaaagggaatgcttccagtttttgcccagtcagtatgatattggctgtgggtttgtcacagatagctcttattattttgaaatacatcccatcaatacctaatttattgagagtttttagcatgaagagttgttgaattttgtcaaaggctttttctgcatctattgagataatcatgtggtttttgtctttggctctgtttatatgctggattacatttattgatttgcgtatattgaaccagccttgcatcccagggatgaagcccacttgatcatggtggataagctttttgatgtgctgctggattcgttttgccagtattttattgaggatttttgcatcaatgttcatcaaggatattggtctaaaattctcttttttggttgtgtctctgcccggctttggtatcagaatgatgctggcctcataaaatgagttagggaggattccctctttttctattgattggaatagtttcagaaggaatggtaccagttcctccttgtacctctggtagaattcggctgtgaatccatgtggtcctggactctttttggttggtaaactattgattattgccacaatttcagctcctgttattggtctattcagagattcgacttcttcctggtttagtcttgggagagtgtatgtgtcgaggaatttatccatttcttctagattttctagtttatttgcatagaggtgtttgtagtattctctgatggtagtttgtatttctgtgggatcggtggtgatatcccctttatcattttttattgcaactatttgattcttctctctttttttctttattagtcttgctagcggtctatcaattttgttgatcctttcaaaaaaccagctcctggattcattaattttttgaagggttttttgtgtctctatttccttcagttctgctctgattttagttatttcttgccttctgctagcttttgaatgtgtttgctcttgcttttctagttcttttaattgtgatgttagggtgtcaattttggatctttcctgctttctcttgtgggcatttagtgctataaatttccctctacacactgctttgaatgtgtcccagagattctggtatgttgtgtctttgttctcgttggtttcaaagaacatctttatttctgccttcatttcgttaagtacccagtagtcactcaggagcaggttgttcagtttccatgttgttgagcggttttgagtgagattcttaatcctgagttctagtttgattgcactgtggtctgagagctagtttgttataatctctgttcttttacatttgctgaggagagctttacttccaagtatgtggtcgattttggaataggtgtggtgtggtgctgaaagaaatgtatattctgttgatttggagtggagagttctgtagatgtctattaggtccacttggtgcagagctgagttgaattcctgggtatccttgttgactttctgtctcgttgatctgtctaatgttgacagtggggtgttaaagtctcccattattaatgtgtgggagtctaagtctctttgtaggtcactcaggacttgctttatcaatctaggtgctcctgtattgggtgcatatatatttaggatagttagctcttcttgttgaattgatccctttaccattatgtaatggccttctttgtctcttttgatccttgttggtttaaagtctgttttatcagagactaggattgcaacccctgcctttttttgttttccatttgcttggtagatcttcctccatccttttattttgagcctatgtgtgtctctgcacgtgatatgggtttcctgaatacagcacactgatgggtcttgactctttatccaatttgccagtctgtgtcttttaattggagcatttagtccatttacatttaaagttaatattgttatgtgtgaatttgatcctgtcattatgatgttagctggtgattttgcttgttagttgatgcagtttcttcctagtctcgatggtctttacattttggcatgattttgcagcggctggtaccggtggttcctttccgtgtttagcgcttccttcaggagctcttttatggcaggcctggtggtgacaaaatctctcagcatttgcttgtctgtaaagtattttatttctccttcacttatgaagcttagtttggctggatatgaaattctgggttgaaaattcttttctttaagaatgttgaatattggcccccactctcttctggcttgtagggtttctgccgagagatccactgttagtctgatgggcttccctttgagggtaacccgacctttctctctggctgcccttaacattttttccttcatttcaactttggtgaatctgacaattatgtgtcttggagttgctcttctcgaggagtatctttgtggtattctcagtatttcctgaatctgaatgttggcctgccttgctagattggggaagttctcctggataatatcctgcagagtgttttccaacttggttccattctccccatcactttcaggtacaccaatcagacgtagatttggtcttttcacatagtcccatatttcttggaggctttgctcatttctttttattcttttttctctaaacttcccttctcgcttcatttcattcatttcatcttccatcgctgataccctttcttccagttgatctcatcggctcctgaggcttctgcattcttcacgtagttcttgagccttggttttcagctccatcagctcctttaagcacttctctgtattggttattctagttatacagtcttctaaatttttttcaaagttttcaacttctttgcctttggtttgaatgtcctcccgtagctcggagtaatttgatcgtctgaagccttcttctctcagctcgtcaaagtcattctccatccagctttgttccgttgctggtgaggaactgcgttcctttggaggaagagaggcgctctgcgttttagagtttccagtttttctgttctgttttttccccatgtttgtggttttatctacttttggtctttgatgatggtgatgtacagatgggtttttggtgtggatgtcctttctgtttgttagttttccttctaacagacaggaccctcagctgcaggtctgttggaataccctgccatgtgaggtgtcagtgtgcccctgctggggggtgcctcccagttaggctgcttgggggtcaggggtcagggacccacttgaggaggcagtctgcccgttttcagatctccagctgcgtgctgggagaaccactgctctcttcaaagctgtcagacagcgacatttaagtctgcagaggttactgctgtctttttgtttgtctgtgccctgcccccagagatggagcctacagaggcaggcaggcctccttgagctgtggtgggctccacccagttcgagcttcccagctgctttgtttacctaagcaagcctgggcaatggggggcgcccctcccccagcctcgctgccgccttgcagtttgatctcagactgctgtgctagcaatcagcgagactccgtgggcgtaggaccctccgagccaggtgcgggatataatctcgtggtgcgccgttttttacgccggtccaaaaagcacaatattcgggtgggagtgacctgactttccaggtgcgtccgtcacccctttctttgattcggaaagggaactccctgaccccttgtgcttcccaagtgaggcaatgcctcgccctgcttcggctcgcgcacggtgcgtgcacccactgacctgcgcccactgtctggcactccctagtgagatgaacccggtacctcagatggaaatgcagaaatcaccgtcttctgcatcgctcacggtgggagctgtagaccggagctgttcctattctgccatcttccatctgagatatttctaactttttgctaatttcagcattaccaataatgctgaaacaaacgctgttatcagttagggtctagtcaggaaaacagaaaaccttcttaggcacttcaaacagaggggatttaatgcagagaattggtcaccaaggggataagagacttgagaagccaagtaggaaggtgaggctatttagagactaggaacaacaggaagatgtgacccccgcctacagctggagagcactcctaggaggaagtggtgttggcagagcacagaagtcagggcaggccctgtgttgggagctaggactgtgaaaggtgctctgggacagaagggaagaaacaccttagtttctcttttcctccctctagcttttcaccagtgcctcccattggccaaatctgcccagaagccagtgggcaaggaatcctgggaatatagtttccagcaatgaacagagcagggagtgcatttgacagcaaagtggcaacagatagctttatgaatacctcttggtacaattgtttgtgtttttctagcacaggcaatgccaggagtggggttactcaatcataggatcatataccttttaatttagtacatgctgccaaattgctcttcaaagtggttgtacaaatgtacattcccactagcattgtatgggtgtacccattttccaacgtttgccagcactcaatattaacaaatgtgttcatttttcctaatatgattagtatctacacttatttcaccctccacacagccaatcgtccaggcaggtcaaggccctgggggtgcttgcattactctattccagtcctaggaaagagtcaagacagggctttagagcttcttttcaaaaacccaactctaggggctctggagctttcaccagttccttttgtttcagcctatttttgtccccaaaggatttatgaattagatctctgtttattttcatgatgtcccagggccttggaggaggtgaggactaggtgtccttggcacacctcaggacttaggcaggttctctgaagtcctcattgtgatgtggcatctcacctctctgggagctggccacagtagtttttcagtggccaccagagagtggccagtataaggaggagagggtggaggcaggtataaggagtggaggagggtggtcagtgtattgaggaattactagtcaaaagatgtgggctctgctctagtttctgccattaagtaatccttgagaacctcttgctttgggttgcatgtgccctttaggggcatagaggagacctcctactatccagggaactcctactgccaaagttggaagaaccctctggaatcatctcatgcagaccctctcattttaccagagggaaacctaggctcagagagggaaatggacttgcctaagaggtcagcttgagctggtggtagaccttgaactagactctccacggtaggttgaagaatgcacacatccccaccccacctaccaacctagccatgtcctaatctcaggaacctgtaaataataccttatctggaaaaatggtctttgctgatgtgatgaaattcccaagagtttgagaattaagagattattttagattatccaggcaggccttatatgctatcccagtatccttacaaaatagaggcagttagagattactgaagcagacagttgagtgaagcagccacaagtcaaggaatgctcacagccaccagaagctggaagaggcaaagaagagtttctccccttgagctggtccacctttgggcccagggatagtgatttcagatttctaagacagtgagagaataagctaccaagttgtgggaatatgttacagcagccacaggaaacgaattcattctccatctcctggtttctccttcactatactagctgtttctttatgttttctttaattacccacttccacagttctctgcacaaatgagatcagagggggctttatatttgcctttgagtttcctgacctcaggatcccttccctgaccattcctttcagcaaccccctgcatgtcatgttaggggcctgggtttctgcagtaataccatgagctgaattggggatgtatggctgctgaaagactgaaggttgtcgggtgttgggaaaataagtgcccatgatcagggcttgtgggagacctgggttcttgtctgagttctgcctctaatttgctgtgtaaccatggacaaggacattcacagttctggaccacagctttccacaaacacaagacaaagaggttgatccaatcaattttccgaaagggtagttcacataatactagtggtatctgagatgatttcaggcagtaaaatggtgagtcattgaatagcactgatttgcagagtcaatattccctttccaattctgagtcagttcttcctcaaggaaaaagtcttaggttaatgctaacatctccttaaccacattttaaaatgtgctgatctccgtttttattgaaatttgagtagactccaggctgaaagcctttagcaggtgataaccatcaaatttaatagaactatttttatgatgtttgcactttacagttaccttctatttttggcaaagtatacttgtttttcatttctagtagtgtatcaatcaggataagctaggttatatcctggtgacaaacactccagctatctcagtggcttaatacaacaaagtttttttcatgctcatagaaagtctgttgtggggccacatgaccctataggccttagaaaacctaagccattgctttcaccagaatcccctgtccaaacacagattgctgccccctcccgcccagagtttctgactcagtagctcttaggttgggccagaaaatctgcatctgtaacaagttcccaggtgatgctgttgctgctgatttgggaaccacactttgaaaaactacagctctacagcaactactctcagctggtgacttagcaatccaggtacaaggtgaatccttgagcatctccacctggaacatgcagcctccttgtcagaagcagcagcactggaaagattcccagtagtaattaattgctctggctggctgggaagtgacacaagtctcttcttcccagccagaaccatcatgaggtgccacctaactcaaggcagagttcaaggaggaggcgggaggtatagggagttatcatcctcccaggagcctcgagagacaagaggactgaagagggtgagcaactggggagaaatctcatctaaaactaggcattttaataacagacaatgattaaaaatgtcctttaaagaaaagagttcttaaagcaaaatgtcacttaaagaagaatttaaggtaaagaatggtagagagggtatgtgctatggcaaaaataaaaaagcgggtatgaaaatgggcagtcggaaaggtctgtcatcctgtgctcctattgcactgtcatagtcagtgacagagactgtagaaattaccctgcagagatcttcaggccacgcactgctgccaggaatctccacctgaggtttccaggagttacagcctggagggatgctgacctcatatctcctccctttctgtgctcagaactttctattctctcttcctcttcttataccccatcctctattgtctatctcaacatgttggaaaaaacaaaaaacaaaaacaaagacaaaggatgattgaatacttttgtcccctaggtaacagccttttgttagtcaccaccagccttcatacctggctgactccttttccctcagtctcccatggctcctgaaaatataaaatgagactatgctttggacagaagaggctcaagtgttttggaataaagccagaatgtggatcagctggggatagagttgggggaaagagagagaaagagagagagagagagtgagagagagagagagagagagagagaaccctgactcttgttcttggtgctccatgtttctttccatttctcatattttaaaataggcactttggacactgtctgtcaagcagcatgaataacgcagcttcacaacagtaaatggtgttaggctcaaagcctgccagtctgcggcggactccaggcctggagaggggtctgggggagatgactggtgcctggggagctgagagtagcagaagcagttttgtttgggaggaggtaggcatgtgttgagattctggctctatgccctgttatattccaggaacaactgcttgtcatttatatctgtgctctttcccatgctttagaaggaactgtttatgagtaaagagtaaaaaactattggtaaagatgtcataggtacaaaagccgtagaaatcaacttcaagcccaattccttcatttgacaaacaggtgcatagtgtattggctttctatcactgttgtgacatattaccataaactaatggcttgaagcacacaaatttattatcttgcacctcggtatgtcagaagtccaatatgcatcgcattggactaaaatcaagatgctagcagggctgcctttctttctagaggctgcctgcattcctcggctcatggcctctttttccattttcaaagtgagcaatgcagagtgagtctgtctcacatcacatcactgtgacctcctcttctgctgccctcttctgcttttagggacccttttgattcaggtagacctacttggataatctaggatactctgtcttaaggtcagctgcctaacaacagtaatccatctgcaacctgaattctgctttggcatgtgtcataccatattcttaggttccagagattagggtgtggatatctttggaggccgttattatatcttccacacatgggatcctggagagtgccaatgactcatttgaggcagagctaggaatacacctaatactcagtattcttcccactctacaacactgtttttaatatataaggcatagagcagagtggttaaaagtacaggccttggggtcagataatcagggatctgggctcaagatttagctcacccttgctagttatgagaacctgggataattacttaaactctcagcacctcagattcctcatctgttaagcagggaaaatatcagctgcttaaggtgaaagatcaagtatgaaagtccatgaaaaatgcttagcaatgttttcaggacacagcaccagtcaatgatatcacttagtatgatctataatgaaacattatacttggttctcctaacaccccttgtgagagcatataagttatcatagccatttgacagatgtggaaactgaagctgcgattgttaaaatgactggagagaggtcgtttagccagttggtgttggtgaatcaggtcaggaacaaggtctatggcccttcaaaccatgacatcctgccactgtttaacttccggtatgtgatccaagaaagaggcttgtctgattttttttctaaacctatactagaggaaaagaccctttaatctttttagaaatgtcttatatagtcctcacactcataatattcagctgcattcctaatgcaaaatacactgacgttaagttcattagcttctcccttgtataaacatgctctggattgctgtgaaggcaatattctttcatgcagtttaaagcagtttttaagccactttgtccatggcctcatgcccatagctcctgcccattgtccctggtgagcttgagtgaagccctccatagaatatataaacctaatcttattggtgggagtctatcttttagatagaacaatatgtatttatttgaccatttatgtatgcaatagcagttactgatattcttgagtactgataaattgatacattaagacattgtaagcttttggattgtgaatgttgggttattttagaggccttgaaaaataacatctctcttccctgcccaagttcagaactgagtgtcaggtagatagtggagttagattggcaaagatcaaaatgtcatcattcttgctgattcaagctagattggggagtattgcttagctgtggggctgaatgggcttggaaatgctccccacccagtcctggaaggcatgtccaccaacgtcttcctggaggggacagcatgggccccaacaagctttctgcatggctctgagcacagacaaaatggtggtctcatttcctttgggaggccatcctgagagaagagagggtacccagaaccagaacctcagatctcttctcctaaactgatcagtcagataactcccttttccacctatgaggagggctattggaagagatgtgacaagtgttttctagatgaagttcttccacttagagatatgggtaatgaggaagacaaattctcacctaaaagtgggaaaggagtaaaaggatattctgtataactaactggttacagccagttctctgggaattgttcccagcccatggcctaggtaaccactatatactgaagaatgttcgaatctgggcagaccacatgtggagtgtctgtgttgcaaaggaacaataactgaatattgatagtgacaaaacgcatccaaacccctggtttggcatccaaggctggtgcaagctgggttcacagaagtggatgtgaagatggggcttgtagtggaaaatgtttatacgaatcaatacctatgaaaggactggggaggacacagtactaggcagatgaagaagttgaagcaggcccgacaaaccctcagacaacccagtaaggagtgaatattgtccttcagtgtcacccacagaggggcaagatggccaggccctcagggcaccacctccttcagttgctggaggggactcaggccaggccaggggctccctgcagcagatacagaccctgaaggagaggcagcagggcagcagaatcctggcagttccctccagtgcccagccctgactgtgtctgctttctaatcctctgcctcttcctaccttttccttgacattttagtcattcccagttgcctgcagttcccagcagatcatatgccctttcatgtctctggttgttttctaggatatcttttatgctaactcattcccatttttcatgactcaattcaggcatcatctcttctaggaaggtttccctaagtccaggctgggctgagtatcaccctgctgcatacacatagcattctctcagcacttatcaagtgatattacatttttttgtgaacggacctgtctccaccaggtctcagtttttttacaggattatatcttgttcacctttgtacctagatgcctaataaggtcctagtacatggcaggtgttcaacagatgcttgtcttctcatctctccttttagggccatgtcctcattcgacaaacatatattgatcacttttgtgcaggtgctacaagaactcacagatcagtgggcctagtatttttgtagccattgcagggcccagaacagaatctcatacattatcatttctcaggaaatactctttttaaaatcagagccaatcttctcctgccaaaattgcgtcaacacaggatctagaggcagtaggggacttgagtaggtattgccaggcacagggacaagcaaggtcttggaaagtatttgaaataattttttaggaaaggaaactgctaaggccaatgcccttctgatttgcttttgtctctcccatggaggaatctctcagggctctataaagataaatgaaccctggactgttagatctgtaaggactttaagggtgatgaggtggggagagatagaaagaaggaataacaaaggggctggaggaagctggacttggtctctctgcttaaactcagttctgtggggataggaactatcctagttccactgagtgcccagaaagaaccagagaggcaacaaagtgtcaacctggtcaccctagatcagcagggaaatatggaaataaatgccctttggtctactggctgggccacaaaggctgaacagaggtgaaatctgttatgcaaaagagaatcaggagtttcacatcagccaaatgggaagaggaaaggcccctgcaattgttcagaggagaagaggaagaccaatggcaatataatctttcatcagccactccctgtcgggggaataagctttcatgcaaccttctcccttctcttagcagggcagcacagagactggaattgcctggggtcaaatcaaagtcacagtcatttacttggcattggttgccttctctgtccatccagtctgtgtggggacttattagatttcactgcagaggtttaccaggtttgtaaggtgtcttggcttctgtgctgtgagctgggggtataaatctggtgtcttagttgatttgtgttgctataaaagaatacctgaggttgaataattcataaataaaagaggtctatttggcatacaattctatagactgtacaagaagcatggcatcagcatctgctcctggtgaggcctcaggaagcttccaatcacagaagaaggtgaaggggaggcagcatgtcacatggtaagaggtgaaagaagagagagggaggggagaggtgccatgcccttttaaacaaccagctctcacctgaactgcagagtgagaactcattcattacctcaggaaggcacaaagtcattcatgaggagtctgctcccatgacccagatacctctcaccctctcatgaggccccacctccaactctgggggtcaacattcaaactgaagtttggaggggtcaaatatccaaactatagcatgtgattatgggccagttcctgtccccaaggggctagtggccagttggagagacatatgtgatgataatagtgtcggcaataatcaccatattattgagaacttactatggactggttgctatctcatttattcctctaacgacattacaagatgatgttgataatatccccatttcacctgtgaggaaactgaggcttagagagcttagtttcctattcaaagtcaccatggcaagtaaataaatgaggggagactcaaacccaaatctgtgcaacagcaaagcccatactctatgccagagcttcccagctggagatgattggccctctcatgctttcccagggacattaacaatgtcttggagacattttgggttgtgacagtgtggctggggatggctactggcatttggtgggcagaggtcaaggatgctgctaaatgtcattcaatgcacaagacagtccctccatactccaacaaataagtattaggccaaaatatggatagcactggggctatctctaagccagtgcagctctaagccatctctgtgcaccgtattgaaataggtatctctactttctcccaccttgttattgcttagcctagctccggaatgttttattcatagtactcatcacaacttattatttttgttcatttgcttgtgatttcagttgttagatatctcctccactctcagctgcttgtgggcaaaggctatgcctgccgtgttcaccacttcatctctaataactagcacagcatctggaatgttgtagaggctcaatgaatatttgttgagtgagcaaataggcaaatggacatagtgcaattaaataatctgtgcaaggtcataagaacaaagtgccaaaggcagtatttaaacctaggtccttttgaatccaaattctctgagttaaggcatctcagggtaattaaagcattgtaaacatgtccctgttcatgtccctgagagttcagagttcagcagaggagcgagaaaagtctgtgagtgtcagggcgtgatgccagattcaggctgggaaagaaacaagggacagaagaaggatgagaagaacttcaggactcagctgagtcctcatgctagtagattggagaggacttagtggagagttgcccagatattaaaagaactgtttaaaatgaccagaatcaatcttgctcacttttaagcaaagatgggcaatacaacatttatcttctctcagtcctcagggactttgggcctcttagaattcccaaaaataatggctagtggctccacaaatgtaatttaagtcctagaaataccctaaagtcaagtactggtttggctgatagatcccagccctgggagcagctaagcctgactctgttcctgcaggagagccactgtgggagccaactccatatgggctcaggcctggggaggctgtcagggtaaggggaggtagggactgaggtacatgaaggcaagggcaagggagtgaggggagacagaaagaagagagagtgaaaggcaaggaggaagtaagggttagtggcagaatagggaggaaggaagcaagggaggaaatgaggggaggagaaagagagagaggaaaggaaagaaggaaggaaaaagagaaaggaagagcagctgggaaggagggagggagaaagaggaaaggagggagagagaagggaaagaggagaggggggaaggaaagcaagggggaaggaaggagaaagggagagaaagagagagggagggagggaaagagaatgagagggagggagggaagaaagaagagaaagagaagaggaaggaaataggtgggaaagagggaaggaggaagagaaggagggagggaggaaggaaaaaagaaggggaagagagaagaagggaagaaggaaagaaggaagggaggaggaaagaaggaaaaattggtaataggaaatacttcctgaatatttataattgcctcaaattgtgtgaagtccttaaaatgaataacaacctttactgctgaaaacaaccctatgggggtaacttctttcatcatgtcctttttatggattaaaataatgccaagtacatatagcaagatagaagaaataacttcgaatgttcaatagcagagtagggtgactatagttagcaaacaatgtattgcatatttcaaaatagctagaagagaggatttaaaattttcctaacacatagaaatgataaatactcaaagttatggatattctaaataccttgacttgatcattcccgttctatgcatgtattaaaatattatgtgtaccccaaaatattatagctactgcaaatattttgtatctatagaaattttaaaaaacaaagcacagagaccttaaccaacatgactgaggacacactgaggcaataagtggtgaattcagatgtgaaaaatgtgcggtctggggaagagctgctgtggtggggatgggagaggggacaatgggaagggcagagccaggctctatcatggggtctgtgggaataaactgaaagctcctaggtgtctaggggcagatagtaggggtctggaggctggactctagctcagaatggctgtctttgataagagagagcccagcctgctctttttggatcttagggcagcccaaagaggctctttgtttgaatgggctttgctgatagattgtattggacattccttggtgacactattgagccccaaaagaattgtaatgccattgttagatatttatcctttgttcttgaaaggaaagaaacaggagcgatgaaaatgatccagttattatcatttcattatgcatggggacaagaaaaacaaaggaacagagaaaggaagttattaaaataaatacaaatggcttatatatgctgtaacatctacaggttgtgttcccacctgttttttcataggatattcccgttttgtggtgggtgttagatctgccctccccagttttaccaaagaagaaactggttcagagagaggaagtttccaattagtaagaagctggcatgcaaactcaggtcttcttattcaaatcgttagctctttcctgtgtaccatattcaagtcatgctcagtttcctttaaatgaaattgacttttttttttttttttcaaattaacttcccagaatgaaagttgtgtgaaacaagattctggtctattaatcatagagaagattaattctagaatgagtttaagatttgcttatgacaaatgtcccttcaataattgtttatgtaagaggttattttttaaaaagttggtgcccaaaaaagtagaatatgtcctcttcggagcaaattaatggaagcaaacaatagtgttcttggaaatctcttggataaataacttgtacatgctgttctctgtagtcccacctcacctgaggttacatccttattcctctcgtgaatccagctctgctgaagtcttgacttttcatccctattccaccttcctaatccttggcacctgtggatcttcccttccatgtcatttctagggccctttctacctctaccccatagaaagcaagctccgcagggctggggcttggtgtctctttttttttgaggaggagtcttgctcagtcgccaaggctggagtgcagtggagccatttcggctcactgcaagctccccctcccgggttcacgccattctcctgcctcagtctcccgagtagctgggactacgggcgtctgccaccacgcccagctaattttttgtatttttagtagagacgggatttcaccgtgttagccagggtggtctcgatctcctgacctcgtgatccacccgccttggcctcccaaagtggtgtttcttgactgtggctgcatccttagcatactgtgtggctcacagttaagcacaatatttgcaggttgaatgactgcatgggtcaccagccacaaaacatagactggtatcattattgtgagttctctagactcaacttatattcctagcctcaaccttggcacacagaatgagagctctgtaaatgtttgccaaataaatcaaggagtgaccaaaatattgttttataaaacacatgctttcagtagaaacagaatttgcccgtcttgtgaaataacatgatatttcgaactgtgtccatgaagacaatggagtggggtggtgagtggtgggggcaattaacaatctccgtacatttgcgtgttttcatggtgcctgtaaaggtcacaggtgcctaatgcttctggctggcagacaccttaatcaagtggcagcagtaataacagtgacacccaacagttactgagcacttatattaggccaggcactgtgccaagggctttatctatattaactcattttatttttctttgaattagaattagttattatcctctttcaacaggtaaggaataaggcacaaagaggtcacataaatggaactctatgaagccttatggatatgcatgggagcttccaggctgccctggggatgaggggaaggggcaagaccaggagaagatgagaaaaggcatcaggcacgagtctgtcctcccctcctacagttgtagcagattgtatttggttaaatattttatatattgggcttctgcaaaagatttattagagggaaagagtttcgtctagctagaataaaaggtttatacatttttaaaattgatgttttagttctacagctaggaagcctaaaggctggagaatgttaaatatcttggcaattgtcatagtggcacagccagatctaaaaaatttcagcctccaatggtccgggcatctatttcttcagcatttattgcttagatgcccaggtgtctctgtaatggcacttgaatttagtgtacttgttgaccaagaaacttccttttccagaacttttgcttgcagaggtatgtcctgagcaatattaagtaaaataaggtaaatgtggaagtatctgtcttgtagaattgttggagagaggaaaacaagatgagcaaggccagggttagacaaggcaggaagtggaaagaatactcagggaatttggacaaggctagggtgggtggggggtatggcttctggctctggaatacaaagggcaataacaataacatgactttttgaatgactaaccagttgcatgcatactaagctacatgcttcacatgcattggcactttccataatgagagcagtgaattctatttctttgaagagaaaacagaaactcacacagctggcaagtggcagagagaaactcaaccaaggcctgtctggcatcaaagtacattctctgaacccctcagctacactgctactttaaaccttttcaggccacagggcctaaaagactttcttgaacctggtagcaaattttgggactaaagcaggtttaaagttatggttcctgacccaaactcaggcacatactgaagccttgaattagatctgcctttagggccagtccagggcaattcaaccacctgctacccagatgcctgagactttttgacctgaggaccaaacttttcgttctccaattagagataaaatagaaactccaggtggcctcttgagtaccttttagttagtgaacaagtcagaaataatggccaaaagcaatccatgcatttgtatggccctttaaggtttaaaaaatatttcccccatgtgttttttcaatgtcattagaggccagctataacccctatgcaacagagctgagactatggatcacaaggaaggaattatttatggagagttacacacatctcagcagtggctgacctagaactcagtccctagtcttctcaggacattttctctttgtaaggcactagaaaacagaaaggcactagaagagaatcgaagttcaaagggtaggagagaagggcgcattgaggggccctgtacagaaagaaaattctgaccactgatttttcagaaggcacagtgctggatggccctgtttctcttaagctgggtgggggcccagaggaacagagcccagaggtatttttgtcttgttgcttcaacccagggagctccacttggaatgatttatgatgatttcttgggtttattatgtaaacacggcctacaccaaggaggggacttacattcccagggtcttccttcctgagtggcattgctctaaaattattttgctttaggctgaagctatagcataagggtcctcaagttgtcaaacctggaacattagaatcatgagagaactcagaggttactcagcccagctgtcttattttgcagttggggaaactgaggccgagaggtcagaagggagttgcttgaggcacataactgactagagtaagtggctgggctagaacacccacataaccctcaactatatcctccatgattactacagctcttgggagagaatggtaagcacatcagatatacctgtgtggagcttagattctatcagggaagataaactttaaacaaataattggaagtgggtagtgaaggaatagacgtgctttatggtactataaccagggaccacaacctggcctggggctaagggatagcttcactgaggtaatgaggtttagatagagactcaaaggaggggcaagagtttgtccccatggagcataggaaagaatacattctggatagagggactagcatgcacctgaggcagggaggagggaggcaatgaaaattggccagtgcaggaattgagggggcatgaaatgaggctgggaaggtggtggtcgggggaggtctggtggacctcacaggagtttagattatattttatatgcaagggagagccatgagagtttcaagcagaacagaaagtggtgagatttgatttgctttttaagtaagatctctctggctgctttgaaaataatggctggtgagcacaggtctgatgtaaacattggctccttacccagtccaccatggcctctgtggctcagtgtccccgttagcgtacacacacctgggatattggaatccggctgtgatttcttttagtgtaggtgttactcatgaagctgggcacaggacatgtgccctgtaaagcccttgtggcctgccttgggataaaaccagacagcggtgttcttgctagtgttcaaagggcacagtggaagtgggaagggcctagaagaaatgccagggatggaggaagcgaatgccaagaagccagggtgcccaatgggactggtctagagggtcctccttccacacagacaggcctcaatgcttcctgtaacagaaaatttcacagttcacaaaactaccttataatacatgcattttctttttccagtcactttgtctttccatctgcatcctgtctgtttttccttgtttccttcaggagatattgtggtgcttttaaaagcatgggctttagagaaaggcaagtctgggtttgaatcatggcttttccacttactaactgagtcactttgggcaagtttcttaacctctcagattctcagttacctcatctgtaaaatgggtatgttcatattttaattatgaagttgtaaggtttgaataaggtagtatgtaccttaagtacttaatatgtaccataagcagaacatacttaagtacttggaacttagtaggtgcaccgtaagtttctcttgctcattcatttgttcagtgtttattgggtagctattgtaggccaggccctggctaggtactgatgtcataatggtgatccccaaaactcctctttcaagtctggggcagcgatcaatgttccccaacttcagcatgtggggaaaatatctcttgccatggaggatctggaaaaggggcccagatcaagagatagaactagatgctgtctaagcaatgctgtcaagggcccaggttaccatttttcccatattttcctcttgcagtttcttagttcagttcaaataatcacactgtgtctgtaactgtgtggcaggcccctggctaggtcccataaacgacaccatggtcagtgagttgtaggccttggccaatatgataatgccaacaggatggtgactgagatggtgaagggacaaaacttgtcacaaggaagtttaagttggtcataaaagactcaattagtcttctaatttctgattcctgtcataggaaagggggtcaaatggcattttcaggttttttggaggcagatcgaggacctttggtaaaaatcaccataaggcatattttgtctcattaaaagaaacatagctttctaatatctttaggtgtccagcaataaaacaggctgtctaatatgtagagcaaactgtatctctgggaatccataggacaaggctggataaacgcccacagggtgttataaagggagtgccttgtttgggtgaaaggtttgatggaatgacctctaggtttcctagtagttcagagacacaggattctaagtttccattgtcgggctcacaccaccttcccttggatgcctgccagtttcctccctctgggactcaccctgaagcttacctcactgcttcctgaacccaactcgggaaacttgctgtgccaacttagcaaccctgggatccacatgtcaggctccgggggcacacatgaaatagattcccgtctgtgttctggctgaacaatttgattttgctattataacctgaccctttagaaatcttgcccctttaggtgtttatatttcctttcttagatttgtatttcacacacatttcatatcataaaaagatatgcacaccagcatctgttataaaatttttaagcttagtattttggaaaatcaacagtgtagtggctctagagtcagacagctggattaaaatcccagctccattacttactaacagtgttgtgttggctaagccacttaatctttctaaacctcagcgtccttatctataaaacaaggtaataataacacctagcttataggaatgctgtaagactaaatagataataaatacaaagtgcttggaaaaatgtctggtacattgtaacatttccaataaatgttaatggtaaataaataattattaaatattgattttgttaataatccttcactttctcttttacgtattagttttaaaattatttcttgcctcttttagaagtcagaataatattggcattgaaaggattctaaagggtactgaatctaacccattttttactgctaaggaaattgagcctcagggctcattgaacagtagagccagtaataggatccatcggcctttgcttttgtctgatgcccttttatttatcataattttcctaatgagtattaattaagagttatcttatttttctgatagatggcttcaaaaaaataacaaatgccttggcaatgatttcttggacatgataccagaagcacaggcaacaaaagcaaaaacagatgagtaacactacatcaaactaaaaacttctgcacagcaaaggaaacaaccaacaaaatgagaaggcaacttacagaatggaagaaaatatttgagaaccatatatctggtaaagggtgaatatccaaaatatacaagaaatctctagaactcaatagcaaaaaagtaaataatgtgattaaaaaatggtcaaaggaacttgctatagtttgaatatttgtcccctctaaaactcatgttgagctgatgtaacttaatgtctaatataacagtattgagaggatggattaatggagtattacaagagtgggtttgttataaaagccattttggctctcagtgtgcctctctcacccagtgatgccttttgctatgttatcacacagcaaaagactcccaccggaagccaaccagatgtggctgcctaatcttggacttcccagtctccagaactgtaagaaataaatttcttttctttataaactacccagtctgagagatgctgttacagcaatgcagaacggactaagatagaaaattggtactgagaggtgacgttgttgctagtaacaaatacctgaaaatgtggaagaaactttggaactggtaggggtagagactgaaacagttttgaagttaatcctggaaaaagtctatattgatatgaatggaatgttaaaggtgattctggtgagggctcagaagaagagaagactagagaaagatatgcacattgtacatatcactggtttcaagtatgctgccccaacttccaggatttatgtactgtgagcaaaaaaatctgagagctattgtcctaagtgtgacatggaacaagtgttccctagggacataattttgtgcaatactgggttgaacaaagttcaactggttttctcactgcaggatttctcagtgcctttagtgtgctaatgcacatggcgagtcccctaaaggaagtttagaatgtagcattcatccatctttcttggccacagagccatgtttttctttccaagaacatatgtgggcactagtgttctgagaaaacattttggcaaatactgttgcagaaggagttcaccttctctgttttcatctgaggaaagccagagactgttatacaaagggttaacctaaagattcatcctttttagttcctgatacacaactcagcctctcacctcggcactggcaccaagccttactcaaggtactttctgaacacatctgagaagactcaaagggctcattactccctttagagaggagatgggggcttttcttcatgcaaaactgaaaaatggtgattcatacactctaccatggggttagagtcagaaactggtaaattttttctgcttacaacattcagcaaaagcttacattccaaaacctagctcccaagttgcctctacacaggacatgctgtgttggaactgatttctctccatctccctggacactgtggaaaaccttcatgttttcacctgaacacaacaggctgagctaagcctttggtcagtgtattgttagcctgaggaagttagtagcttggaatgtctctttaggttttcggactattttttactcatcagtaaaatgagagggtaagataggaggtaacaaacacagacatccactaaacctgttctgtgctagatgccatgctttgacaatgcagcagtggagaaaatatggttttttgatagaggcatggcaataaattacaatacatcatgctatctgcaaaaagtgctacagagacagaggaggaaaggatgaattgtgtttcgatgatctttaagattcctttcgccgggcgctgtggcttacatctatattcccagcactttgggaggctaaggcaagaggatcgcttgaggtcaggagtatgagaccagcctgtccaacatggtgaaactccgtctgtactaaaaatacaaaaattagctgggtgtggtggcaggaacctgtaatcccagctaattgggaggccaaggcaggagaattgcttgaattagggaggcggaggttgcagtgagctgagatcgcgccactggactccagactgggtgacagagtgaggaagtctccatctcaaaaaaaataaattcctttcagctctggtattcttagataccaagccttcttttcttagtatcttagatcttttcttcttgttgcagctggcccagagccttctgaatctcaacacagcagtagagaaggtttaaccttgccatcaccaggtactggtctgcttctgactgaatttcatctggtgtagatgtcattttagtctagttcagcagagttatcctgactcacgtttttaaattcggatggatgctcctcctaaacataagtctaccttagaagcctgggctagggcagaggaggaactgggtgcaggtcagtcattctcctgagccagcctccaagtatgacaggaagaagatgggtccttagtagcaaaaatcataggctcctaccacttcttattgcttaaagtaaataactaaagtgcttcaccctgtactctaaaccctctggctccagggcacacattcagttttatcatctctccctctttacttccttctgagatttgtgctcgcagtactggatactgctaatctctgtctcccccattttttgatacttctcacctcctccttttttcttctcatttcttacccatcctccttttcctccttctctccttccacattccaaatgccatttcctgaggacaatttcagcagtaataaaatcatcatactagtgagttactggttagtttcagacagaaaacccagatgcatggtctgataatctccagctgacccagggtgtgaggaaagatgggctctgaggactttcaggcacttctagcacactctactgagcctcacccagtctccctcccttaacaaaaagtcccattccactagggacaaaatactcggaagcagcattgttagcagtagcagccacaggccacccaccctcttgcccctccttaccttcacatccccagggatgctatagaaaacaaagagccgtggctggagggtgccaaaggtggctggcacaacgaggtctggaaacctggactgtggagtccaggaatgggaggatcacccagttctgctagtgggaagagccttggctgggggctaatgaggaggagaaactccctcccacactttctgagcacagtcagaagtcaaacactctaatctcctccagcctccagcccaagcccaccactaccccactctacatcacctaatctcaggaaataacctcctcaccactttactgataagtctgaggccacctatgaatctctcagaactctcaagactgtcatccaccatctccctgccttccttccttcactactaaatgtgcccttccactggattgattttatctttcccttcctcctccctggacctcccttcaagggcttttgcagtacccctcaatctcttctcttccctggctccctctcttccatctgacatacaagcacagaggagccaccatttgctaactccactgtctcctccctcctgtgttcctcttctccgagctgccactttgccactgaccctgctttttgataagtagccaaagacctcccaatcgcctcctttttaaaatatcccattccacatctgtggggcattaacatttaataaaaattttattataaacataatataaaaataactcttgttatacataattcaaacgttggagatgtgatgtatctcaaaataataagagctatttatgacaaacccacagccaatatcatactgaaggggcaaaaactggaagcattccctttgaaaactggcacaagacagggatgccttctctcaccactcctattcaacatagggttggaagttctggccagggcaatcaggcaggagaaagaaataaagggtattcaattaggaaaagaggaagtcaaattgcccctgtttgcagatgacacgattgtatatttagaaaaccccgtcgtctcagcccaaaatctccttaagctgataagcaacttcagcaaagtctcaggatacaaaatcaatgtgcaaaaatcacaagcattcttatacaccaataacagacaaacagagagccaaatcatgagtgaactcccattcacaattgcttcaaagagaataaaatacctaggaatccaacttacaagggatgtgaaggacctcttcaaggagaactacaaaccactgctcaatgaaataaaagaggacacaaacaaatggaagaacattccatgctcatggataggaggaattgatatcgtgaaaatggccatactgcccaagggaatttacagattcaatgccatccccatcaagctaccaatgactttcttcacagagttggaaaaaactactttaaagttcatgtggaaccaaaaaagagcctgcattgccaagacaatcataagccaaaagaacaaagctggaggcatcacgctacctgacttcaaactatactacaaggctacagtaaccacaacagcatgatactggtaccaaaacagagatatagaccaatggaacagaacagagcctcagaaataataccacacatctacaaccatctgatctttgacaaacctgacaaaaagaagaaatggggaaaggattccctatttaataaatggtgctgggaaaactggctagccatatgtagaaagctgaaactggatcccttccttacaccttatacaaaaattaattcaagatggagtaaagacttaaatgttagacataaaaccataaaacccctagaagaaaacctaggcaataccattcaggacataggcatgggcaaggacttcatgactaacacaccaaaagcaatggaaacaaaagccaaaattgacaaatgggatctaactaaactaaagagcttctgcacagcaaaagaaagtaccatcagagtgaacaggcaacctacagaatgggagaaaatttttacaatctacccatctgacaaagagctaatatccagaatctacaaggaacttaaacaaatttacaagaaaaaagtcaaacaaccccatcgaaaagtgggcgaaggatatgaacagaaacttcacaaaagaagacatttatgcagccaacaaacacatgaaaaaatgctcatcatcactggccatcagagaaatgcaaatcaaaatgacaatgagacactatctcacaccagttagaatggcgatcattaaaaagtcaggaaacaacaggtgctgcagaggatgtggagaaataggaacgttttacactgttggtgggactgtaaactagttcaaccattgtggaagacagtgtggcgattcctcaaggatctagaactagaaataccatttgacccagccatcctattactgggtatatacccaaaggattataaatcatgctgctataaagacacatgcacacttatgtttattgtggcactattcacaatagcaaagacttggaaccaacccaaatgtccatcaatgatagactggattaagaaaatgtggcccatatacaccatggaataccatgcagctgtaaaaaaggatgaggtcacatcctttgtagggacacggatgaagctggaagccatcattctcagcaaactatcacaaggacagaaaaccaaacaccacgtgttctcactcataggtgggaattgaacaatgagaacacttggtcacagggtggggaatatcacacaccggggcctgtcatggggtgggaggactggggagggatagcattagaagatatacctaatgtagatgacgagttaatgggtgcagcacaccaacatggcatatgtatacatatgtaacaaacctgcactttgtgcacatgtaccctggaacttaaagtataattaaaaaaaaaaaaagaaagtgaaatatcaccaatacccttttgcctcaatgccaatccctagaggtaaccactataaagagtttggtaaaaatttttctacaccattgcttatgtatttaaaaatttgaggtcattttaatatgcccttttgcaactggcgtttttacttaacactatgctgcacatgtctttccatgtaagtctatacagacatatctcatttttcaaatatccaaatagttttattccatgatgatgtggctatatcataatttatttagccaatctcctttagatgttgaggttgtttctacttatgtattcaatcatgtattcattcatttctgttacaaacaacactgcaatcaattccctgcacatatatctttgcatacctgtgctcggagtactggataccactaatctctctctcctccatttcttttctttttcaacatttcttgcatctccagcttctgtcttggctcttttctgaaatagcaaaccactttcttccctgagcacacagatacagatgcacattcaccccttcttgcttctgtccaaagtttttcctcctgaaatgatcacttcctacttacgtttctgcctaagttttgtgtagacccatctctggtttcccagactagtcttccttgatggcttcttataacagcagggcgaggtatagaccatattgctgtcagcgtttaaaaagtgataaaaactgaagcttagaagattaaggaacttgttcggcttgcctagctagttaaatgacggagccgggatttgctctcaggcctgattttctgtagaatctatgaacttaaataaccaccatgttacattgttcctttggccctggtcctcaaaggaccttgcacacaaacctacaaccacagctacccaatggaatggtggtaactgattaacaagtcagttccctctactagactgggaaatccctgagggtagcccctttgtcttttctttccacataccctatatttagtacaaatcctattctgggtgctgatatggatttgaatgaatgaacctatgtttgtggaatgaagaatgccagcactccccgaaccagattcagagacaaatttcatcactcagcaacacacgatgagcttaaagtgtagtccctgctagtttgtgaaaataaaaaaaaccctctcttccagtgccctaattcactcaattataagagacttttaaaattggcagggagtagaacataatggtttaaaaaacacaggctgtgaagttggaaggcataggttctgatcccagagtagcagctctgctacttactaggcaagttattcaagttccataatccttaattccctctccagtaatttggagctaataacaattacctgctcacagagttatcctgaggatttaataaggtagccaagatgaagcacttagcccagtgcctggcatacaggaggcactcaataaatgttagttgcgttatggtgcttaggatcagtaacagccactttcagtcttggttgaaagtcaatttagatcagacattcatttctcctacacctctccaagctttgaacaggatgactttttagtttaaattgcataaaaagctcactttcttgaccttatttgtaacacaaacatttactgagtgatttctgtgtatctaactctttcctggtagtacctcgttggtcctttaccatcgcggagagtctacagtaggaagaataagcatgctcaggttagagtttggggaggacaaaattttcctgctgtttgtagtttagaacattgcataatcttctgaaaagcacacctttctttttctttttaaacttcaaggatttgttttaaaacattttctcacaaaagtctgaagttttcgtaccttgattcatgaagggggacgggtagtagcttctggagcctgattcatggaggtgcctgtgctattctttgtctttgagacaaaaagttttcctataccagcagctcctgaaggtgactttaggaaacagcacttgttttgttattctgtgctcagttttgacccacatccaagtattaattttttggatgggaggggtggtggctgttgtttgtgtctaagtgggtctttccaaggactatatattagggtaagactccactcctggcaaccaaaacaaaaaacttctctgactccaattcaaatctcaacagaagcaaatgactcagttcaagcaaactttatagattattcaattctggaactatatgttctcggataaccatacccaacattgaaattaaactactctctaaagaaggaaattccttagtaacgtcactcagctccaaaacttgggactgtctttccttgcatctaacttacatgtctccaatcacaaattaagctgttcattctccagctgacatatctgggcaggagatccagcttcagatgctgggaggcgtgaagaggagaaaagctcacttctggttttggtgtgtgtgtgtttgatgtaggtgtggtttcgtgttatgtaagcatctggctctaggcactaggatacctgcactgtcaggggacagggacttctgggtgccaggtgctcctagaagctcagtcactaaggggctgcttggtgcctcttctctctcctcactgtcctggagctctggcttctttgtcacatgttctgttatctgaacttctcaggctaccactttaggatcaaaggagattgtgggccaaaggaacaaaactctcacttttcgagcccacagtgtgacctcggacaagtcccttcctcttcctgggccttagttcctgcagctgagaggtatggagtttcgtcaaaacatgtctgagcctctgcccagcactgacaatctggggctccagaatctgtcgtccagccaggccagtgacctaggtgggaagggcagtgagaacgtagccactgtttggaattcacaggcttgtttggtgggacaactcctaatagatttgattggggatcagagcaacctatttctccgaacctctggtgagaactgattcaggcctgccactcctcggtcagggctgcagaggcatgtaaaatgcacttgtcagagagcattggctcagaagcctgacacttccaccatctgaataccaaacaagacaaaaattgcacaagagatggggcccagatgatccgctgatcaaatcagtatttcaactctggtgtcctcaggatttcttatgtgagggaacaccctcctctgccatttcaaaagacttaatacatttttatccctgagtgattttgtcctcaagaggacctatgggagggaccatgtggattttgaaagcttagtgctgaactaattctgtgccctaatgattatgaaagcctgtgtaaatagggaggcagtggcagggagcctggggctggaagtcaggaggcttgaattccagttctggctttgccactctctggctgtgcagctttaagaaaattgcttcacctctctgggcctcagtgttctcatacagcagcatctctctacggtctctaagacagaaacctctcatcttggtggtagaatggggccagatatacctctgtgtgtgtgtgtgtgtgtgtgtgtgtgtgtgtgtgtgtgtgtgtgttagcccaattctccccttgtgtggagacatagctcttatggaggttacattccttccccaagttcctcttctttgaaggcctttgggacgcatccaagagagtaggtgaactcatggatgcttaaggattggaaggggctttgaggataattacccagctattgcaagaatgcctctcaccccaattatctggtgggaggtgcttggcatgtttgagaaccagcattccatgaaagttaagagccccagctctggagttattcagtctttgttttatatcccagccttgccagtcatttcagttcgtcattcagcaagtatttatcaagtgcctatttcctgccaagcacttagataagctattttgcatatattatcacacttagtcctcacaaccctatgaaacaggtagaggttttatctccatgtcacagatgaggaaactgaaactcagagaggtgatgtgacttattgctagcaagaggcaaacctgaggtttgaatccaggtctattgacaccagcgctatagctctcagccactatgctgtactgtctccaagaccttatcttcttaatgtaaacatctatgatgtagacattattgtatctattttaaaactagatactgacggtcagaatttaagtagcatcatttggtcaaagtcaatgaaagcagggccaggactcagctgggggctactcaacccccacgtcggtgtctctgactgctgtgtgcaatgcctctacctcagccttttggaaaaacctccgtgcatttgccagtctacgttacagactaagcagcatgcctgcttctgaaggaaggacatggaccatgcaatgggaagagccctgaagtctgcatgatgccaacatctcagctgctggtcctgtctgctccttaccaggcacaaggcctgaggcatttccagcctctgcgctttaccagccttgctttcctcacaaggatatttattgtaccagtcaattgagggcctagctatgaaaggactttataaattagaaggtgatgaaagtgaaattattattgttgtagtcccacttctctgtttttctccatcaaactggacaataaattgcatgttgccttcgggaatcttgaaatgcatcatctagtagcctgagccccatgatcccaggatgaagcagcatgaggcaggctatcctctctcacagccggcactcctgcctgactcattcagggatgccacattccgggatgtgaggcattacaatggctgccactgtgacgtgtagtcatcccagaaaggctgggatgtaacattcctgaacagattcaggcatgagaagagagaggagagaaaatttgtaaacaggcagcctggggcttaggagaggcaggagaagttgctcattttctgtgctcttgttttgaaagtctttggaggtgtagctgtccgtccatcaggctgatcttatcatccttcgggaagcatgcatctccagatgcgtgggactcctcacaccagggccttgcactctcggaccaccggttccaggagggctgggtcagaaatcatttgctcacttcactactcactcctctaaggagtgagaggataggaaaaccagaggtgccatctgcaggtggatggaggagctccaggtgatttgtccctgagtttttccagttaagcatttgctctctcccctctcaccctgttgtgctaagggtggcacagaaaaagaattttatttattttgggtctttgtttgtacctgtttgcagcccaaggaaaagagagaggcaaactctctggttcaggcttcggtgagagccttcttttactcaaagagactgtggaggctgccagagagcaagtcaaggagttgggaggtgcagcctgccttgagcagggcagcagggacttgtgggatgagctatggctccgttaggaccctcctcacctggaaacaggactgtgggagacattgccatccctcctatctaacaattcgatgttagaaaactccctgctttgggtagtaccaagaaattagttgtaattatggaaatgaagaaggtggcactgaaagaaagcaccaccaggggaaagggccctgcaggtggaggtggagacctgggctccaggtgtagccttgccacaggctctgtgtgaatgtgagccctctctggggctgtatttatgaaaaagggggttgggcaatgatctctaaggtcccttccaactaggccagtttatgcaagactttccttgatttcagtactgaaagttttgtgtccagaaatccttgcttccaatagaaagcttccctttctggttgttctagtaacttccctctgggatctcaatcccttttctctctgtattgcagaagccttttctctggattaggaaatcattgtgataactcctgctaaatggtggtgggtaggggtgatactcaaaacatgaacatcctctacggtaagggcacaaacccatcagaatgaaccaggccataaaccccagaccattcttggagtgctgtccactccccgtccccggggtgggcaaccccacattgaaactgggcttctatctccaggtctatgacaattccacctgtttctattccacctcttcagtcagtgatgtgaagtcatgtcaatcacttcagcgccagtggaactgaaggattttccagcttctcttttactgcttgctctcagattaaaggtggtgacttccccttcactggtcagttccagcctcagtccagtttcctaaggttttttagggtgagactgctctgagtgatgctgtccaaatccagacaatagtgtctttgcggatgggcttcacgtctctgggattcaagtctgtttgtgccccaccatccttggtgtgctgccagatgagtctttccaaaacagtgttttgtcagcctcctgtacctgttctgaaatctttctaagcacatttcctcagccctctcacccactgtggacaaacaggaccacatattcataatcatgacccacttgtctttggcttctgcctctgtttgcttacatgggatcttggtctcttccaattgtgtttttattcagagagcagctgctaaactgtctggaatgacagaagttcagtttcaaataatagttaacatacgtgtatcacagggtggagaaaagcagagtccgtgtgacctctggctcccattcacctccacaccagctgagcccatttcacatgacctttctgcctgtgtttgtctgtccttcaatgtgctccatcctcacttgtttatgttgcttcctgagcacagtgacttgcatcaggcactgtgctaaaggttggtgaaatgcaagctggatccaacccctatggtgaacctgcattgtgggagggcagatggacatataagcagctgcttcgtgatgggacatgtgtgctgtaatacatttgagtgtcatggccacatacagcggggcctggctccttctgcagtgatatcaaggctgggcctgggtgaggaggagtcatagttagagaatgggtgggaggaagctcgcatgccaggcacggggaaatggcatgcacaaaggcacccctctgtttgtctccctttgtcttccactgtgggtggtgctgtgggcggcagtgggtcagggattgctgggcaggaggccaaggcaggcagagtcagccctcaggaaccaccaggtcagggagcactggcacgcccaagaacccacttcctatttcccagagcagatggaggccatagactcaagtttttctccccattttccccctcattcctcagaatacctgctccttcctgtgtcacaggccagctctgacttggtctccatcccccaggcccctgacaagtcaccagtcattgttgacccttcctttcctcatcttctgccttccatttcctcctttccacagcttctactatggttcaaatcccggtcacccatctcccacctggttggttgcatcaacctcctcatcagtctccaggattcaagtctgtttgtgccccaccagccttggtgtgtgctgccagatgagtctttccaaaacagcgttttgtcagcctcctgtacctgttctgaaatatttgtaagcacatttcctcagccctcaccacgcactgtggacaaacaggaccgcatattcataatcatgacccacttgtctctgacttctgcctctgtttgcttacatgggaccttggtctcttccagagtgcaccccaagtagttccaggaacccccagggcagtgttgctgaaagtggctctgtgcaccagcgccaatctgtgcacgttgctatgatctgcgatgacattagcacatacatggagaataagttgaactttcatttctgtgacctctagcagatgggattttttttttttttttttttagttttacaaaacaaataaacaaacaagcaacagaaacaaaagacacctggcccttcacagatcatttgagccctgccctagggtgtgtcatacccaatcaagtctggctcctccatgcactcctgcctcacctccctgctatccactggcagctcctggagctgttttttcaggaaatcagtccctactgcctctcttcctggagcacagctatccagagtgttcatgtgagaaacagtttgctttaaaaatactgctgcaattcagaatatccacttttgacattaaattaggactcatatttaaaatcactatttaccttctttctttaaagcatttttttcttggtttagtttggtaatttttcaaaataactttaaaagtcaactttattaaaatgtaaattacatacaagaaaatgcacttattttcaccgtacagtgaagagttttgaccaaggtatacatttgttagatcaccaccccaattaagatatagaacaattctatcattctagaaagttcccttgtgcccctctgcagtcagtcccactcctcctgcagccacaggcaaccactgacctgctttctgtttctacagatgggtttggctgtttctaggatctataaatgggatcatccaggatgtactctgacatccataaaatttttgagattcatctacaatgctatatgtattagtagttcaatccttttaattgctgagaagcattccattgcgtgtaccatatgacaatttgtttatgcattctcttgctgatagacatctgggttgtttccagtttttggctacttgaataaagttctctgaacattcatgtacaactctttgtttggacaaatgttttcatttcctttgggcaaatacctagtagtagaattgctgggtcatgtggtggagattatgtttaactttgtaagatgccaaagttagtccacaggctacgtcgcttttgatgagaatcgcatgatttacttattcatttatttttagagacagggtctcgctctgtcgcccaggctggagtgcagtgacacgatcatagcttactgcagccttgacctcctgggctcaagggatcagcctccggaatagctaggattatagtagcacaccactatgcctggctaattttaaaagtttttgtagaggtctcgctatgttgcccaggtctgtcttgagctcctgatctcaagtgatcctcctgcctatgcctcccaaagtgctggcgttacaggtatgagccactgtgcccggctaaggaatcacgtgatttctaattggagcccagttccagctgctctggagaggcagctgtcctcagcttcatggagttaccaatttgtgttatacacagcattgtctaccttagtgtcatgacacaaatgatgctatgattttttgtcagttgtgttgtaagtgaatgtgaaaatatttgaaagtacagatatttgtgaaaattttaccttaaaaatgtatatgtaaaatgggttcaaggctatctttttaatacataccttctaattcatttacattataataggcttattttatttattgctacaacttgtaagaagtgactatattagttagcatccagctttagatgcgtttaacaaagacctagaagaacagtggcttaaacagagagaagtctacctctctgccatgtgaaactcttcatgtagacagttcacggctggtatggagcctccacaggcatccaggatccaggtttcttccaattctctatcatcctcaggtgtgtcccctcatgtcaccatcctgagtggaaacccaaccatcagatccataatccagatagcagggagaagatggaggggaataaaggatacgccccctcccttaaggacacaatccagaacctgacttttctacttctgcttacaacatcccattgggcagaacttagtcacatggctgagcctagctacagggaatcctgggaaatgtagccgtgtttcaacttgaaatttggcagccatattacaggggaagaatgaaagagtagatattgggggacaggaagcaatttctgccatatttgccatttttaaagtgttataaatagttattcataaactattgcggtttcttacaccccctaccccacagcattttggtgggtaataataaaaagtgtaattgtaataataaaagtagtaaaacttgtggataagccagtaggagtgtgctgtgcctgggaacaatgtcttgtacgtgacattagaaaacatgtagagaacttgtctcatctctttaccctgacattcaagttttctacaatggggccacagcctacttttccaaatatttaattcttcacttctgtgcttgagagctctattttagcaaaggatagttaaagaaaacgtaactttcttccctccctgtcatttgtcatgttgttcctgtcacttagaagctttccttggattcctagaacatgaacttatgctccacctcaggtcttgcctcttcctttctctgggatgtgtttttcccagacagctttttatatagccctctcctttttgtcattcagatctcagttcaagtaccaaatggagagagaggccatctctgataaactttttaagtactgtctcttccccgcacccccaccccactctctatcacattactctgcttcattttcttcatagcattgttcaatatctgaagttaccttgttttgttacatgcttatgctgcttctgcatcttttcccatagaacgttctagaaaagccaaggcctgtcagtttgctcactgttgcacatttggcttgatggctcatgttagagactcgatagcacattgcttaaatcaagaaatgactgcatacccgtttctccctctctaacctacttaggctctgagccaagcccacagcctcaacttgctctatgaagtatgttttgatccttttgccccatttgcatcatgcctggcttcttttcatctttcaaactgaaacttaaatgtcacttccttggaaagcccatcactgttgaccccagagcaggcaggtgtcccccttacttcatcagagaaccctgctcctcatttccttcagggttcttttcacaacatgtaattctatatttacttacatctacacttactttttttttctctctctctccccactagaggttaagccatagaggtggagaggtcagtcttccttgccctcacggtgaatcccagggcacagtatggtgtctgtatgtagtaggtggtccagaaacttgtgaataaaccaatgaaagcacaacatgtgctgcctataccgcttacctggataataacgatcccctctctatctttaactttaatacccgtaagattcttcatctaggcaattctcatctctcttttgtaagctccttacagacagggaccagtttcctctttatacctcttcactccagcatactgggtttccttagatcagtttttctgacactgtattccaggattgttgataagcattgcaagaaaactggattccatgatcaaaaagtttgcttgtactaggttaagcttaaatggttgtttgttttgttttgttttgtttttttaaatcacagaactttacaaggattttgatgtgctattacaggatataaatttccaagaggtgagataaagtagtcagtattgtccaaactttttggaaactttattttcttttttcggagactaatttgaggtattctaagtgtttcatggtacatactctcattccctctagctttttttgaatttctcttctaccttcttatttgtttccctactttttctccaatgagcctctcctctttttaaaactcccttgtaaatgatcttaacactgactgtcatttgtagggtgcagagcacaggtgcaactactcaacctcactcgagaagagcctgcatccaaggtctgtaaacctcagaatctggtgtgcccaatctcacagaagccctcatgcccctgagtcttaatttttccactggtatgatttaggaagtaatgagctaaataataactttgctggtaagtacttggggggacaccaactagatttcaaactactgtgggtttcatttccaatctggaagatgggattggccattgatcaggagatgtacacaggatgttgaatctactacactccaacctcatggtagagcaactgactcagaccactctgtgagccttccccagcatcggtctcctgatctaataaacttgagcaccagatccacctaatgggatgtgctgacctgacagggagaaatgtttcctggcttactgtctgcttgtagtgttgacttcactggcagtagcagggtaagcaaacaataaaacaaaacagaacaaaacttccctcaaatctaccaggaaaagccccacacagcttgggaagacttattctacataagataattccagaatagcagagccaagaagaacttatagataccattgtaaaaagggcaaaactgaggtcaagttgaggaggtgcctgcccagggccacatgattgaggctgggcctgagcagagaacagcatctggcttcctgatctttaagctggtgctcttttaatttcaccaatctgtctcagtaaaggatatttttagtacattgtacttattaaatagttttatggtctatgattctgtcttaaaagcttgcaagccaaatgtttaatattcctctaagaaacagaaattaaatggtttattctgtgtctcctaatttgtctcacagatctgtttgggagcccaactcagacagtggtgaaagagcaatataaaataactataatgaaaggtgaagacagaggcattcccattgtcatgattcctttgggtgtcagggacaaacttcatagttgtcaaagaatctgagtattgcggcccaggggctatgggagaacactcccatttcacaggtgtggaaactgagacacagaaaggggcagggccatttttagagtcacattaggagtgagttatttgccaaggcaggtaggacttgggccttggtcctcccagagtgaagcatttccgtctatcacaccattcggcctttttaaagttccagacctggaggcagatagcttgttctaaacctgtttaagccattatgggttaagcacagataaaatagagtcccacaggggttaggaaatgctgtgcctggagccagtggctgtgtatttaagacattaggcctctccttgagaagaacaggctccatgggcccagagaactgaagctgtatttatctgggacttggcttcaggcatatatccccaggcaacaccccaggcctcctttcacacaggctccctattgctgatgagtgaagtttgcatttcctcagaatgttcctgtaagttcccagcaggtctcccagccaagctggcagtggactcaaagtgagaggctggcagccagaagttggatctgtcagtgctgccaacacagtgctgtggctcagggctctgggtctctctctgccttgccatatagggcctagccgatatagggctccctagtgcataaggacagaaaggaaatctggaaaggccttttgggagctgacccagtgcttttcctttacagatggagaacctggaccaagaaagagagaggtgactttattaccagtaatcctagaattaatgacagacctaggagctgtcctaagcctctggaccgtaatcaataaataatgaatgaatgcgaggtatgcggcaggtgctgtgctaagtgctttaccacccattcatttatttcttcctaataagcccttggaatacacgaggcagtctgtaggctatatgcctacaatgaaaaacacaggcaatggtccttgcctacacatagctatagacagacaagtgattgggcagttacaatccaaggtggtacttgctgtaatgggggagctatagggtgctatggaaaacttgggaggaacatttaatctagattggattgggggaaaaattactagcagcttcctccaaagtataacatcaatgctaggaccaaaggtgaagtaggaattttgtgagccaaaggtggatgggtaaaagcattctggaagggcagactgcatatgcaaggccttggaaacaggagcctggtacggtgaggatttggaagacatgtagtgtggctggaatgtggagcataaggtgtgggaagaaatgaggctggagagagaggcaggactagaccgcaaaggaccatgtaaatagtacaagaggtttagacacttgaggacaagatcctggggaggtgttattagatggtatccagaaggaaaaaaaatgggctaactcataaactgctgggctgccctgccccaacaggtctccagacaaggctagatgaccactcactgagaaggtataaaggggctttggatattgaatataaggggcagctgatgtcagccaggtaggaggaagcaagtctttgagccccttgtctccctcactggctcctgattcatgtctatgacatcctaagatttatttattgttttcaaaaattcattttagaaccactgctcaagccaacttggcggtctcgtgaccagggccccagtccaatacttggagggcagaggaaaaagccagttgtttggagccccttgcaaatatgagccaatatttcttttctttctttctcctgcccccaacccctgccacctggagtggattcctccaccaagcatagacattgaggaaatgtggtcacagaacagagaggactttctgttattggatctttcaattctaaaatatgcttttgatttcattttatagatttcaattctgtagtgaaattctctgcgtgtcatctacttttttgaacatatttatcacagttatttgaaagtctgtgtttgataactcgtatttggaatacctcaggattgctttctgttgtctgtttttctttttggtactgtttcttgatatataagttgtatttggtatatgcaagatgacagattttcttttctggcaggcagttagagtaattcaatccaattaggactcagctgagtaaagattgattttggcctttgttaagactgccttatctctgcctaatttctgtggtgagcctatagccctccaggggttctaagtgagatctttaggtgtttatcaggaccgtttcttacttggttgctcctggattccaatttttgtttccagagcactgtgagcctgctaaaacttctcctgagctcttccaacactttctgcttggccttttagcctcttgctctgacagcttaagactcagcaaatgtcccaagggggaaaacagaagtggggctcatatcctctttataatcttgtctcttaagtcctagttgctctttgatggcttcaaacagatttttaaaattttgtatttcatccaggtttctcactggttcttgtggaagttacaagctactctatcatagatagaagcagaggaatggaacattacatcttgaaggccggggacaactattctaactgggaagttgcaatggttctcaggaggcgttcagaatcgcttaccaactgggctttaccagctgttggtcttgatcccagggcagaactttgctgtatcacatttccccagaacccctgatccctttctcagtttaaaaatccctttacttggccctgagacttggtgcccagtgctggggacaagcaagaaagagggaacaggtagaaaattgttagttggtactcagtggagcagtattgtaccccacatgaagtagttggaagtatgtagggatttttttctttgttgccacatggcttggggaagaggatgattgctaaagccaagtacacttggaaaagtcctgtacaatgtgattttttttttttttttggtaaaaatattacttttccattacgaaaaatgaagccccttccactatcactctggattccatctactcttatattctcaatggcttttttccctctcaagggcaaaaaaatccctcctatatctcattttttcttctctattggattaatcccataaacattaaaaacaggcacaaatgtctccaattaaaagcaatatcaaacagaaagaagaacttccttgattttacatcttcctctagactaccatctaatttctcggctttcttccacagaaaaccttcttgaaagtaatccagggtaggcaagctccaaaactggagcttagcccatggaggttcttgcttcacccagtaaagaattcaagggtaagccagtggtgttagacagcaacttttattgaagtggcagtgtatagtaacagcagagttactgctccttgtggagcagagctaccccataggccatgtgcctagagtggcagctcagaggcaattctgagcgccttctgcatagtcttctctttaatttgcatataattaaaagtaagtagtcatatgtttaatatatgcaaatttatatttcatatatgcaaatttgcatatattaaagtgtgaatactcacttttaattatatgcaaattaaagagaagagtatgcagacatttctagaataggaagtaacttctgggttgtcaggttgttgccattggaaaggggcagcaacttctgggtgttgccatggcagtggtaaactgatatagcactggtggatgtgtctcatggagaggtgtttttgcctcttccctgtttcagctagtcctcgatctggcctggtgtctgagcctcacctctggagttgagtctcaccttctacttcaaaagggtcatcataatctttctctacttccttatctcacatttgctcctccacccactgcggtcagtccccccattccgctgagtatgcttggagtgctaaatccaaatcacttttctcttctcatcttacttgatgccttagtagtatttatcatggatcatcattcccttttctggaaacatttttctggctgctgtgaaatcatgctctccttcgttccttcttctctggccatgccttctctgagacctctgttggctcctgcctcattctctctcttgatgtttgaatgcctcagatcactgctcagcttctctatctcctcttcatccaggtaacctcatctggctccatggttttacttatcatacatatgtgagaattcctaaaattaaacccaatcttaacctctcctttggacaccatttgtatcccattggatgttcagcttcttctcatgtatgtctgatgggcatcataaatttggcttgctgaaatgggaattcttggtttatcttcccaacatatgtgctttttcctagtgttccacaatccctaagttgttcaaatcaagtcttggaattttcatgaagttctctttccctttttcctctatatctgatccataaacaaatccctccaaattatatccctagtattcccagtcttctctagttcatgccactgttatctctggtctggatttaggcactcattttctaacagatcttcctgcttccatgcttgctttgctatgatccattctcttcaaagcaggcagagtgactttctcaaaacataatcatgtcatgtcattctcacctgcctaaaaattctctagtggctttcctattcaacttacagaaaattcaaacttcttcccagtttagcaatccctctatgttctggctgcctcctaccactctgactttaatttgtaccactctttctctggctcactctgctccaccatactgaccaagtgctgtttcacaaccagaacaagttccttcacgccttagggcctcggcactttgttccttctgcctggaacacgttccttgtcatgtggctggccacttcttgtccctcaggtcttagcttgaaagtcacctctttctgatcatctaatctgagctagccagatagtcacttgtaatctcttacctattttaattctctacattttacttattactatctggtattttcttaattgatttattcatgtattcattgattttcttacagccaatatcgcccgactagaatacagacaacatgagaatatgagcttatcttttttatttactattgagtgctcagggtctagaagagcacctagcacctagcaagcagaaagatttcagtaaatatttgcaagaaattgggtatttgtaaaaatactgtaggagatggaaactttgaattcaactttgaccctaaatcaaatattaagtcatttcctttattagacttttattttcttactttttaaaataagagatgctctcaaagctagtcagtcatcctcgtgtcctctgtcaccatagattgggtttaccagtttttgaaatttcttataatgaaaacgaacattagatactcttttatatgtagctttttgactcgatgttctgtgaaattcatttatttgtttcatgtaggaatagtgcatcttttccattgctatgtacttttggcgtttgaatatatcaaaatatatgtagtcattcaaaaaaaaaaaggagggtgatggtgatgacagacaagaccagcggtttaaaaactgtgttctacagaagctcctcttcctctccaggactggcatagttggagggccaagcaagtgaggcttcagcatcctctcctcttccctttttcccctccaaccagaatggtagttgggccattctggttttgtttattttatagatgaaccttgggtcatccgggtgttaggtcagattgcatttataaaaaaaaattataaaaatgtttctgctgtctaaaagaatatcctttaactcagctattaatgtcagacattggattttgagctcttctacctttgagctgtatgacttaagtgaattaatcactctgtgcctgtatttccacaaatgtacacatgtggtatcaataataatgttaggttaggttacatgagctaacgcatgtaaaatgcaataaattctagctgctattattattattattattttgtcattgtcatcatctacttcaccatccttgcctggggcactttcccctctgctgatctatgttaatttgaggctttgttgtagtcactcagcctgggctcccattcagtggaaaactggatgcctcctacttctattcctagcagcaggatggggtatcctagttgggtctcctggcttatcccacccagtgcaccagaaataaaccaactcaaacttgaatgcctgggaaaaagctgctctgctccttgccagaccacatttctcaaagagaagagggaaggaaaaaagaagacacagtctcagttaagctcctcaagtacagtgtgaacccgacactcctaaggtgtccaagtcaggttccaaaaactaatgggttatccacagatgtcagtacagataccaagcttgagtttcatttttcatttcatcacaggatgaccttggccaagtcattatgtcatcatcacaggttctctggattcattgacatcctatttccccactaagcattacctgggtagattgaagtgttgtgcatttgccaacaggcagttgggagatgggataactgcgtagcaatgtgcaaaacgcagatgttaggtagaagactgagccttgtatgatgtattcctgagggtccgggatccacagggaaatctcagggcataaaggaagtacaccagatcataaaaagccatgccccaggatgtgttcccaggccgctagagaagtaggtagttagagtcattctcagttgctctggtatctgtttcactgcctgccttggaaaatccatcacccctttctcccttctttctggtgctggcttcaaataagcaattcggtgaggtcttgccatcagaaatcaaggcatactggcttgctgcacttttatttgagactcacgtcaaacactgacgtacttactgcctaatgactttgggcattttgccatgatgggagtggtggtgggggtagtggtggttaaaaattatgctgtttacaagagtagtttcccactggtactgtgaggcgtgcacatctttccgaaacgccgaattccatatgcatcatgtttcgtttgtgtctggctaggagggccattacagggttagactagacattaaaacaacgggtcagttgtctctaagtaaagacaatactgttgtatagctttcctaataaatgacaaaacctgtgtttgaatccagaactattcttcaatttcaccttttttattcaagaggtaggactgaatctctgctccaccacatagctctgggaccttgggcaagttttttcactttagtttcctaatttgtaaaccagggataataaaacctacctcatgcaattattatgagtattttattatcattattttatttcaatgcgtttttgggcaacaagtggtgtttggttacatggataagttatttaggggcgatttctgagattgtggtgcacctctcagttgagcagtgtactctctacccaatgtgtagtcttttattaccccctgacctcccaccctttccctcaagtccccaaagtccattgtattgttcttatgcctttgcgtcctcctcacagcttagctctcacttatgagtgagaacatatgatgtttggttttccattcctgagttacttcacttagaataatggtctccaattccatccaggttgctgcaaataccatgattttgttcttttatatggcagagtagtattcgatggtatatgtgtgtgtgtatgaatatatatttatatatatatatactatatactatatgtgtatatactgtatactatatatataaaatatcacattttctttatccacttgattgatatctttttgtataatgacttctttgcctttgggtagatacccagcagtgggattgctgagtcaaatggtagatctacttttagttctttaaggaatctccacactgttttccgtagtggttgtattagtttatattcccactagcagtgtaaaagtgtccccttttcaccacatccacgccaacatctattattttttgattttgtaattatggccattcttgcaggagtaaagtggtattgcattgtggttttgatttgcatttccttgataactagtaatgttgagcattttttcatatgtttattggccatttgtatatcttcttttgagaattgtctattcatgtccttagcccactttttgatgggatttttttttcttgctaatttgtttgaattctttgtagattctggatattagtcctttgtcagatgcaaagtttgcaaactctataggttgtctgtttaccctgctgattatttcttttgctgtgcagagctttttagtttaattaagtcccatcaatttatctttgtttttgttgcatttgcttttgggttcttggtcatgaactctttgcctaagccaatgtctagaagggtttttctgatgttatcttctagaattttcgtggtttcaggtcttaggtttaagtctttgatccatcttgagttgatttttatatacggtgagagatgaggatccagttttattcttctacatgtagcttgccaattatcccagcaccatgtgttgaataggttgtcctttccctactttatgtttttgtttgctttgttgaagatcagttggctgtaagtgtttggctttatttttgggttctctattctgttccattggtctatgtgcctgttttataccagtaccatgatgttttgatgactatggcctatggtatagtttgaagtcaagcaatgtgtctccagatttgttctttttgcttagcttgctttgactatttgggctccttttttggttccagtatttagccatggttcctaaaattccatgactttggggattgtttttttctagttctgtgaagaattatgatggtagtttgttgggcattgcattgaatttgtaggttgcttttggtagtatggtcattttcacaatattgattctacccatccatgagcatgggatgtgtttctatttatttgtgctgcctgtgatttctttcagcagtgttttgtagtttttcttgtaggagtgtttcacctccttggttaggtatattcccaagaattttattttattttattttattttttgcagctattgtaaaaggggttgagttattgatttgattctcaacttgattgctgttggtgtagggcagagctactgatttgtatacattgattttacatcttgaaactttactgaattcattcatcagatctaggagctttttggatgaggctttagggttttctaggtatacaatcatatcttctgtgcacagtgacagtttcacttcctctttaccaatttggatgccctttatttctttctcttgtctgatcgctctggctaggacttccagtactatgttgaatagaagtggtgaaagtgggcatccttttcttgttccagttcttatagagaatgcttacaacttttcccattcaatataatgttggctgtgggtttgtcatagatggcttttattaccttaagatatgtcccttttatgctgattttgccaaaggttttaatcataaagggatgctgggttttgtcaaatgctttttctgaatctatttagatgatcatgtgatttttgtttttcattctgtttatgtggtgtatcacatttattgacttacatatgttaaactattctggcatccttggtatgaaacccacttgatcatggtggattatcttttcgatatattgttggatttggttcactaatattttgctgaggatttttgcatctattttcattagggatattggtctatagttttcttttttttgttgttatgtccttccctggttttgatattagggtgacgatactggctttgtagaatgattaggggaggattccctctttctatatcttgtggaatagtgtcagtaggattgataccaattcttctttgaatgtctgatagaattcagctgtgaattatcttgtcttggattttttttgttgttgttagcaatttaaaaattaccatttcaatctcattgcttgtttttggtctgctcagagattctatgttttcctggtttaatctaggagggtaatatattgtcaggaatttgtccatctcctgtaggttttctagtttgtgtgcctaaatgtgttcatagtagctttgaatgatcttttgtatttctgtggtatcagttgatatctcctattttgtttctaattgagctaattttgatcttctgtcttcttttcttggctaatctcagtaacggtctatcaattttgtttatcttttcaaagagccagcttttcattttatttatattttgtattttttgttgttgtttcaatttcatttagttctgttctgatccttgttatttcttttcttctgctggatttgggttcggtttgttcttttttctgtagttagttgagatgtgacctcagattgcctattagcactctttcagactttttggtgtaggcatttagtactatgaattttcctcttggcaccacttttgctgtatcccagaggttttgataggttgtatcactattattgttcagtttgaataattttttaattttcatcttgattttattgtcgacccaacgatcattcaggagcaggttattaactttccatgaatttgtacagttttgacagtttcttttggagttgatttctgattttattcccttgtggtctgaaagagtacttgatataatttctattttcttaaatttattcagacttgttttgtggcctaccctatggtctatcttggagaatgttccctgtgctgatgaatatgtatattctgcagttgttggatagaatgttctgtaaatatctgccaagtccgtttgttctggggtatagttcaggtccattgtttctttgttagctgccttgataacctgtctagtgctgtcagtggagtattgaagtgcctcattatcattttcttgccatctgtctcatttcttattacaccatggggtgtaatagtaatagttttataaatttgggagctccagtgttaggtgcatatgtatttaggattgtgatattttcctgttagaccattccttttatcattatataatgtccctctgtcttactaaaccattgtttttgctttaaagtctgttttggctgatataagaatggctacttctgctaactttgggcatccatttgaatggaatatacttttccacccctttaccttaagtttatgtgagtcatgtgttaggtgagtcttcctgaagacagcatatgcttggttggtgaattcttatccattctgccattttgtatcttttaagtggagcatttaggccatttacattcaatgttagtattgatatgtgaagtactattctacccatcatgctgttgcctgaatatcttttatttttcatgttgttattgttttataggtcctgtgagatttatgctttaaggaggttctattttggtatatttcaaggatttctttccagattttgagctcctttttgcagttcttgtagtgttggcttgatagtggcaacatctttcagcatttgtttgtctgaaaaagactgtatcattccttcattcctg

SEQ ID NO: 48 - DNA, 3817 bp, Homo sapiens
  Genbank Accession No. L43821
tgaattcgtgagagacttgagggaggcgctgcgactgacaagcggctctgcccgggaccttctcgctttcatctagcgctgcactcaatggaggggcgggcaccgcagtgcttaatgctgtcttaactagtgtaggaaaacggctcaacccaccgctgccgaaatgaagtataagaatcttatggcaagggccttatatgacaatgtcccagagtgtgccgaggaactggcctttcgcaagggagacatcctgaccgtcatagagcagaacacagggggactggaaggatggtggctgtgctcgttacacggtcggcaaggcattgtcccaggcaaccgggtgaagcttctgattggtcccatgcaggagactgcctccagtcacgagcagcctgcctctggactgatgcagcagacctttggccaacagaagctctatcaagtgccaaacccacaggctgctccccgagacaccatctaccaagtgccaccttcctaccaaaatcagggaatttaccaagtccccactggccacggcacccaagaacaagaggtatatcaggtgccaccatcagtgcagagaagcattgggggaaccagtgggccccacgtgggtaaaaaggtgataacccccgtgaggacaggccatggctacgtatacgagtacccatccagataccaaaaggatgtctatgatatccctccttctcataccactcaaggggtatacgacatccctccctcatcagcaaaaggccctgtgttttcagttccagtgggagagataaaacctcaaggggtgtatgacatcccgcctacaaaaggggtatatgccattccgccctctgcttgccgggatgaagcagggcttagggaaaaagactatgacttcccccctcccatgagacaagctggaaggccggacctcagaccggagggggtttatgacattcctccaacctgcaccaagccagcagggaaggaccttcatgtaaaatacaactgtgacattccaggagctgcagaaccggtggctcgaaggcaccagagcctgtccccgaatcacccacccccgcaactcggacagtcagtgggctctcagaacgacgcatatgatgtcccccgaggcgttcagtttcttgagccaccagcagaaaccagtgagaaagcaaacccccaggaaagggatggtgtttatgatgtccctctgcataacccgccagatgctaaaggctctcgggacttggtggatgggatcaaccgattgtctttctccagtacaggcagcacccggagtaacatgtccacgtcttccacctcctccaaggagtcctcactgtcagcctccccagctcaggacaaaaggctcttcctggatccagacacagctattgagagacttcagcggctccagcaggcccttgagatgggtgtctccagcctaatggcactggtcactaccgactggcggtgttacggatatatggaaagacacatcaatgaaatacgcacagcagtggacaaggtggagctgttcctgaaggagtacctccactttgtcaagggagctgttgcaaatgctgcctgcctcccggaactcatcctccacaacaagatgaagcgggagctgcaacgagtcgaagactcccaccagatcctgagtcaaaccagccatgacttaaatgagtgcagctggtccctgaatatcttggccatcaacaagccccagaacaagtgtgacgatctggaccggtttgtgatggtggcaaagacggtgcccgatgacgccaagcagctcaccacaaccatcaacaccaacgcagaggccctcttcagacccggccctggcagcttgcatctgaagaatgggccggagagcatcatgaactcaacggagtacccacacggtggctcccagggacagctgctgcatcctggtgaccacaaggcccaggcccacaacaaggcactgcccccaggcctgagcaaggagcaggcccctgactgtagcagcagtgatggttctgagaggagctggatggatgactacgattacgtccacctacagggtaaggaggagtttgagaggcaacagaaagagctattggaaaaagagaatatcatgaaacagaacaagatgcagctggaacatcatcagctgagccagttccagctgttggaacaagagattacaaagcccgtggagaatgacatctcgaagtggaagccctctcagagcctacccaccacaaacagtggcgtgagtgctcaggatcggcagttgctgtgcttctactatgaccaatgtgagacccatttcatttcccttctcaacgccattgacgcactcttcagttgtgtcagctcagcccagcccccgcgaatcttcgtggcacacagcaagtttgtcatcctcagtgcacacaaactggtgttcattggagacacgctgacacggcaggtgactgcccaggacattcgcaacaaagtcatgaactccagcaaccagctctgcgagcagctcaagactatagtcatggcaaccaagatggccgccctccattaccccagcaccacggccctgcaggaaatggtgcaccaagtgacagacctttctagaaatgcccagctgttcaagcgctctttgctggagatggcaacgttctgagaagaaaaaaaagaggaaggggactgcgttaacggttactaaggaaaactggaaatactgtctggtttttgtaaatgttatctatttttgtagataattttatataaaaatgaaatattttaacattttatgggtcagacaactttcagaaattcagggagctggagagggaaatctttttttcccccctgagtgttcttatgtatacacagaagtatctgagacataaactgtacagaaaacttgtccacgtccttttgtatgcccatgtattcatgtttttgtttgtagatgtttgtctgatgcatttcattaaaaaaaaaaccatgaattacgaagcaccttagtaagcaccttctaatgctgcattttttttgttgttgttaaaaacatccagctggttataatattgttctccacgtccttgtgatgattctgagcctggcactgggaatctgggaagcatagtttatttgcaagtgttcaccttccaaatcatgaggcatagcatgacttattcttgttttgaaaactcttttcaaaactgaccatcttaaacacatgatggccaagtgccacaaagccctcttgcggagacatttacgaatatatatgtggatccaagtctcgatagttaggcgttggagggaagagagaccagagagtttagaggccaggaccacagttaggattgggttgtttcaatactgagagacagctacaataaaaggagagcaattgcctccctggggctgttcaatcttctgcatttgtgagtggttcagtcatgaggttttccaaaagatgtttttagagttgtaaaaaccatatttgcagcaaagatttacaaaggcgtatcagactatgattgttcaccaaaataggggaatggtttgatccgccagttgcaagtagaggcctttctgactcttaatattcactttggtgctactacccccattacctgaggaactggccaggtccttgatcatggaactatagagctaccagacatatcctgctctctaagggaatttattgctatcttgcaccttctttaaaactcaaaaaacatatgcagacctgacactcaagagtggctagctacacagagtccatctaatttttgcaacttccccccccgaattc

SEQ ID NO: 49 - DNA, 2765 bp, Homo sapiens
  Genbank Accession No. U64317
gggctgcgactgacaagcggctctgcccgggaccttctcgctttcatctagcgctgcactcaatggaggggcgggcaccgcagtgcttaatgctgtcttaactagtgtaggaaaacggctcaacccaccgctgccgaaatgaagtataagaatcttatggcaagggccttatatgacaatgtcccagagtgtgccgaggaactggcctttcgcaagggagacatcctgaccgtcatagagcagaacacagggggactggaaggatggtggctgtgctcgttacacggtcggcaaggcattgtcccaggcaaccgggtgaagcttctgattggtcccatgcaggagactgcctccagtcacgagcagcctgcctctggactgatgcagcagacctttggccaacagaagctctatcaagtgccaaacccacaggctgctccccgagacaccatctaccaagtgccaccttcctaccaaaatcagggaatttaccaagtccccactggccacggcacccaagaacaagaggtatatcaggtgccaccatcagtgcagagaagcattgggggaaccagtgggccccacgtgggtaaaaaggtgataacccccgtgaggacaggccatggctacgtatacgagtacccatccagataccaaaaggatgtctatgatatccctccttctcataccactcaaggggtatacgacatccctccctcatcagcaaaaggccctgtgttttcagttccagtgggagagataaaacctcaaggggtgtatgacatcccgcctacaaaaggggtatatgccattccgccctctgcttgccgggatgaagcagggcttagggaaaaagactatgacttcccccctcccatgagacaagctggaaggccggacctcagaccggagggggtttatgacattcctccaacctgcaccaagccagcagggaaggaccttcatgtaaaatacaactgtgacattccaggagctgcagaaccggtggctcgaaggcaccagagcctgtccccgaatcacccacccccgcaactcggacagtcagtgggctctcagaacgacgcatatgatgtcccccgaggcgttcagtttcttgagccaccagcagaaaccagtgagaaagcaaacccccaggaaagggatggtgtttatgatgtccctctgcataacccgccagatgctaaaggctctcgggacttggtggatgggatcaaccgattgtctttctccagtacaggcagcacccggagtaacatgtccacgtcttccacctcctccaaggagtcctcactgtcagcctccccagctcaggacaaaaggctcttcctggatccagacacagctattgagagacttcagcggctccagcaggcccttgagatgggtgtctccagcctaatggcactggtcactaccgactggcggtgttacggatatatggaaagacacatcaatgaaatacgcacagcagtggacaaggtggagctgttcctgaaggagtacctccactttgtcaagggagctgttgcaaatgctgcctgcctcccggaactcatcctccacaacaagatgaagcgggagctgcaacgagtcgaagactcccaccagatcctgagtcaaaccagccatgacttaaatgagtgcagctggtccctgaatatcttggccatcaacaagccccagaacaagtgtgacgatctggaccggtttgtgatggtggcaaagacggtgcccgatgacgccaagcagctcaccacaaccatcaacaccaacgcagaggccctcttcagacccggccctggcagcttgcatctgaagaatgggccggagagcatcatgaactcaacggagtacccacacggtggctcccagggacagctgctgcatcctggtgaccacaaggcccaggcccacaacaaggcactgcccccaggcctgagcaaggagcaggcccctgactgtagcagcagtgatggttctgagaggagctggatggatgactacgattacgtccacctacagggtaaggaggagtttgagaggcaacagaaagagctattggaaaaagagaatatcatgaaacagaacaagatgcagctggaacatcatcagctgagccagttccagctgttggaacaagagattacaaagcccgtggagaatgacatctcgaagtggaagccctctcagagcctacccaccacaaacagtggcgtgagtgctcaggatcggcagttgctgtgcttctactatgaccaatgtgagacccatttcatttcccttctcaacgccattgacgcactcttcagttgtgtcagctcagcccagcccccgcgaatcttcgtggcacacagcaagtttgtcatcctcagtgcacacaaactggtgttcattggagacacgctgacacggcaggtgactgcccaggacattcgcaacaaagtcatgaactccagcaaccagctctgcgagcagctcaagactatagtcatggcaaccaagatggccgccctccattaccccagcaccacggccctgcaggaaatggtgcaccaagtgacagacctttctagaaatgcccagctgttcaagcgctctttgctggagatggcaacgttctgagaagaaaaaaaagaggaaggggactgcgttaacggttactaaggaaaactggaaatactgtctggtttttgtaaatgttatctatttttgtagatattttatataaaaatgaaatattttcc

SEQ ID NO: 50 - DNA, 121724 bp, Homo sapiens
  Genbank Accession No. AL136139
gatctctggagccaaagctaaccgccggaaaaaacagtttgtatgagtttcatgaagtatgtctctgggcttttgtaaataattttaactcaaataaaactacttcttgcaatacaaaaataaaatttaaaaaacttaaatattttatttatcttcatctcatcctctagcatttctttttctgtacattccatgatataaagtaacaagtgtgataatttgtaaacaaatatgtattaaaggtgtgtgctcaaaatttttttgttgtaacttaagaatggcatacaataaaaaaatacttgagtatgtgctggaaattgtgtttgaaaaggtgtttgtagaaatcatttgaagcctaggacgatgagcttatttctttgtttctgccaggccttaaggctacactaatccaggattcccctaatccaatttcagaaattgaacttttctgggtcagcccgatcagtcaaagccaaccaggcttcaggtgtattttcagccgcccctttattcctgtggtgaggcccttcggggtctgagccctctgtgcctgggattctccagaaccccagtcccacaactccagctttgcccttgtcacccagagttgtggaaagcactgctcagcctcatcttaggatctctgaatgccctccctgggtaaaagagcctccaaacacctggttcttgttttagatttttctatttctatcttctccccaatcttggcccacttatttctcattgtctcattagctctttaactttttttttttttgagatggagtttcactcttgttgcccaggctgtagtgcaatggcccaatctcggctcactgcgacctccgcctcctgggttccagcaattctgcctcagcctcttgagtagctgggattacaagcacctgccaccatgcctggctaattttttgtattttcagtagagacggggtttctccatgttggctaggctggtctcaaactcctggcctcaggtgatccacctgcctctgccgcccaaagtgctgggattacaggagtgagctaccgcacccagccgatgtttgtaaaaagatttttgttttaattctgactttttagttggattcagctagagaatttgtccaatttatttagtctacgattaccaaaggcataatcaaaaacatttagagactactgtcttagactatgccagcaatctcttaatgaatctgcaatcttttcttacccctgatctctcctccactttactgccagatcaatatttttaaaacaatgttcccatcaagtcgttttgacttgagagtcatcagtgactcactgtatagtggccctgtactataacaatttggtgaaactggaatttcccagtatttcctttcctttatgtttctggatcagcgttggccaataaagacacgttggatgatatttgagaggttgaaatgaagcagctgccattttttttatgctttagtgactggtgaagggcaggcatattgtcactgctctgcagctagctcacctcgtaggtatgggaaaacaccccaaaacacagttcccccatgtactgtattgagcagtgttgtcctgtcaaaattcacattcaccagtaacatcagaatgtgaacttatttggtaatagggtctttgcaactgtaattagttatattaagattaggtcctaatggattacggtaggccctaaatcccatgactagtgtccttataagaaggccatgtgaagacacggctacacagacatgcagggaagaatgctgtgtgatggtggaggcagagattggagtgatgcagcttggccaaggaaggccaaggattgccacagccaccagaagcggaaaagactctcccttagagccctcagagggagcatggcccagccaataccttgcttttggagtcctggctttctgaactgtgaaagactaactttctgtggtcgaagccacccagtttctgtggtactttcttatggcagccctaggaaacgaacacactccagctcctgccagatctcccccatcagtttcttcaactcctggactgagtgcatgctcagttccatagtgaagggcacaagcttcttctacacattatctatggcatcaaggttggaagtggggagaggaggatgttggttccagttagtctttgcagggtctagttctctttgttggtcctagtttgcccctgcagtttccagtcgcccttacccttgtccacatccaactttccttcccaactgctgttttagcaactgtaggctcaacactaggcatggaaacaacagcctgcttgggctgccctgtcagctcccacaattgcctgagacttaactcctacaataaatcctgtattccatgcccctgtggtggttctggctttctgatcaaattctgacaggctcttttccaaatcaagtaaaaatgaattgaatgcaagcaatcctgctacctagttccattagggccaggtgtggtgactcacacctgtaatcccagcactttgggaagctgaggcgggtgggtcacttgaggtcagaagttcgagaccagcctaactaacatggtgaaaccatatctctacgaaaacatacaaaaattagctgggtgtggtggcgtgcacctgtagtcccggttacttgggagtctgaggcaggagaatcttgaacctgggaggcagaggttgcagtgagccaagatcgcaccactgcactccagcctggatgacagagtgagactgtctcaaaaaaataaaaaatatatataaattaggttattaagatgcatgcatttattgaagacatcctaagtgcaggtgacactgtgccaggtaagctctttctatgtagcatctcattacattgtcaaaatgattccgtggagagggtactacagttgccccttgaacaacacagggtgggggtagggatgctaaaccccccacgcagtcaaaaacgtgtatataacttttgacttcccaaaaacttaactactaatattgtctacgaatgactagaagccttacaaataacataaacagtcaattaacatgtattttgtatgttatttgtattatatgctattatgttatttatacaaaaaagtaagctagagaaaagaaaatgttattaagaaaatcatgctgggcgtggtggctcacgcctgtaatcccagcactttaggaggctgaggcagatagaccacgaggtcaggagatcgagaccatcctggccaacacggtgaaaccccgtctctactaaaaataaaaaaattagctgagcgtggtggcgcgtgcctgtaatcccggctacttgggaggctgaggcaggagaatcacttgaacccaggagtcagaggttgcagtgagccaagatcgcaccactgcactccagcctgggcgacagagtaagggtctgtctcaaaaaaataataaatgaataaaaaaaagaaaagaaaatcagaaggactagaaaatatatttactattcattaagtggaagtggatcatcataaaggtcttcatccttgcagtctatacattgaataggctcaggaggaggaaaagcaggggttggttttgctgtctcagcaatggtaggggtggaagaaaacccttatataagtgaaactgtgcagttcaaacctatgttgtttgagggtcaattgtattattattagtattaaacattagtaagaggcttaggaagatgaagtcattcaaccaagttagttagaattcaaacccagagctgaattgcagagcaggaacttaaccaccatagtctccctcaactccaaatttttcagaactgaaaggaactgttatcttttccatggaatcttaggcatcctaaccatcactctcacaaacgtactcatgacctcaagaatttgctcatggtttttctctcaatctttcctttctccagatcttttcctgtctgtggtacaatggaaacgaaattttaagttatactgacctgtgtttggatgtcagttcaactcattacccactacaaatttttttagagtcactaagcctcaatcacatctgaaaaatcctatgttatacatgtaaagtaatatttaaaatagtccgccaggcgtggtggctcacacctgtaatcctagctctttgggagggcgaggcacgtggaccacctgaggtcaggagttcgagaccagcctggccaacgtggcgaaaccccgtctctactaaaaatacaaaaattagctgcgcatggtggcacgtgcctatagtcccagctacttgggaggctgaggcaggagaatcacttgaaccttggaggcagaggttgcagtgagccgagatcacgccactgcactccaacctggatgacaagagtgagactctgtctcaaaaaagaaaaataaataagtaagtcacatatatacacgtctggttccctcttgctagactggatttttcgtctttttataaactataacccatagtaagaatgtattttgcattgcaactcagttcacacacacactccactaatacatacacccacatacataaataactgaaataaaacttccataagtagtatttgcccttactacttgtgatatacatttatagattctattctagtcgttaaagtaccagtcatgactctcactgaattaatttcaggatgcacatgagaggtgacagcgtgctggcagtcctcacggccctcgctcgctctcggcacctcctctgcctgggctcccactttggctgcacttgaggagcccttcagcccaccactgcactgtgggagcccctttctgggcgggccaaggccagagccggctccctcagcttgcagggaggtgtggaggaagaggcgcgcgccggaaccgggggtgcgcgcggcgcttgcgggccagctggagctccgggtgggcgtgggcttggcgggccccgcactcggagcagccggccgtccctgccggccccgggcaatgaaggacttagcacccgggccagcagctgcggagagtgtactgggtcctccagcagtgccagcccaccagcgctgcgctcgatatctcggcgggccttagctgccttcccgcggagcggggctcggaacccgcagcccgccatgcctgagcctcccaccccctccgtgggctcctgtgcggcccaagcctccccagtgagcgccacccactgctccacagcgcccagtcccatcgaccacccaagggctgagaagtgcgggcgcaaggcgggactagcaggcagctccacctgcagcgctgtgcgggatccactaggtgaagccagctgggctcctgagtcgggtggggacgtggagaacatttatgcctagctcagggattgtaaatacaccaatcagcaccctgtgtctagctcagggtttgtgaatgcaccaatcgacactgtatctagctactctggtggggccttggagaacctttatgtctagctcagggattgtaaatgcaccaatcggcactctgtatctagctcaaggtttgcaaacacaccaatcagcaccctgtgtctagctcagggtttatgaatgtaccaatcaacactctgtatctagctactccggtggggctttggagaacctttgtgtccacactctatctagctaacctagtggggacatggagaacctttgtgtctagctcagggattgtaaatgcaccaatcagtgccctgtcaaaacagaccactcggctctaccaatcagcaggatgtgggtggggccagataagagaataaaagcaggctgcccgagccagtagtagcaacctgctcccgtctccttctgcccttgggaagctttgctcttttgctatttgcaataaattatgctactacttactttttgggtcaacactgctttttatgagctgtaatactcactgtgaaggtctgcagctttgcttctgaagtcagtgagaccacgtagcccaccgggagaaacaaacaactccagacacactgtcctaagagttgtaacactcactgggaaggtctgcagctttattcctgagctagggatactgtggacccaccaaaaggaagaaagtctgaacacatccaaacaccagcaggaataaactccagacacgccaccttaagagctataacactcaactgtgagagttggtggcttcattcttgaagtcagtgtagaccaagaacctaccaattacggacacactcagatgggtcaacattgaaaaacactgagctaggctgggctattttacaacagggagcatatttatttttgtactgctagtggcaagcagtgcatggcatgaagtaggtgtaggtgtttggtagataattggtgtaggactggatttatccacaagggcaggaatctgtcttaccttgtatccaccctacatttagcatattcttcccacgatatttaatgatcgaatggctaaaatttgtgaggctttagagataaaacatttggatcgaaatctgacgagcacctactatgtgatacataaatggtaaaaccatagcttctctcttttaataccaatctaatgagacgtgactcctcttaattatcgtaaaagaagtatgggattgctgagagaaaacactgctcaactgcgaaaacaagaagacatttggaggcgaaaatattacctttagtaataaggctacatcagagaacaaaaatagtgtatgagccagtcaggcctgttgattggacctaagtggaagcacctagggtggacctccctttgctgctggcctgtgtggatataaggcataaacagctcagatttaagaggaatgtgggaaaagtggagctctgcaaaaccagtttttcctaaaggcaccaattaagtaaatcactcctcccctgaccagggacagaggggataaaagagcatagagagaccagacgtagttttttttttttttttttttttttttttttttttttttttgagacagagtctggctctgtcacccaggctggagtgcagtggcgcgatctcggctcactgcaagctccgcctcccgggttcacgccattctcctgcctcagcctcccgagtagctgggactacaggcacccgccacgacgcccggctaattttttgtatttttagtagagatggggtttcactgtgttagccaggatggtctcgatctcctgacctcatgatccgcctgccttggcctcccaaagtgctgggattacagacgtaagccactatgcccggccccagacatagtattattacaccacctgagctgcctccctcatggaaggaaatagcagaggaggaaaggtaagtgttcccccactaagaatcagatatgggaaagaagacatatgtacatatttgtatttacatgtgtgtatttatactgctgtggtttgaatgttggtgtccccccaaaattcttatgttggaacccaatgcccaatgtgacactattaagaagtggggcttgtgggaaatgattaggtcatgaggactccaccctcttgaatgagattagtacccttgtaaaagaagctcaagggctgggtgtggtggctcatgcctataatcctaacactttgggaggctgaggccagcggatcacttgagtctgggagtttgagaccagcctgggcaacatggtggaaccccatctctacaaaaaatacaaaaaattagccaggagtggtggtgcatgcctatagacccagctactctaaaggctgaggtggaaagatcagctgagcccaggtatgtcgaggctgcagtgagccatgatcgtgccactgcactctagcctgggcggagagtgataacttgtctcagaaaaaaacaaaaacaaaaacaaaagaactcgaaaagcttgagcgaactgccttgcctcttccaccttgtaaggacacagcaagaggtgccatctatgaagcagcgagccctcaccagacattgaatctgctggcactttgatcttggacttcttagcctccaaaactgtatgcaataaatttctgttgtttacaaactacccaatctaaggtattttgttacagcagcctgaagtaagacatatatgaacatatatatatatatatatatatatatgaagtgctaaatataaaacaatccaagggctatcacaaggtgggcacacaattgctaaatgtaatttacactagcatttctcaagtctgttcatcaaaacatggagaacattaaaaaaattacaggtcctctatacctccttccctgccttcagtattcctgatatgaaagttacgaaattttttttttttttttaaacagagtcttgctttgtctcccaggctggagtgcagtggtgtgatcttggctcactgcgacctccatctcccgggttccacaaattctccctcctcagcttcccaagtagctgggattacaggcacgtgccaccatgcctggctaaatttttttgcatttttagtagagatgaggtttcaccttgtggtccaggctggtcttgaactcctgacctcaagtgatcctcctgcctcggcctcccaaagtgctgggattacaggcatgagccactgcgcccggcccaaaatctaggaatgtttttaaagctccctggataattccaatgtataaacaagactgataactaggtgtagtggctcacgcctgtaattccatcactttgggaggccaacgcaggcagattacttgagcgcaggagttcgagaccagcctaggtaatatgacgaaaacctatctctacaaaaaataaaattagcagggcatggtgatgcacgcctgtggtcccagctactcaggaggctgaggtgggaggatcacttgagtccgggaggtcgaggctgcagtaagccattggcttagaggagctagacagacgagtgaacaggagtcagggaggtcttattgaggaggaatgtggacagacattgcagaagtaggagtgaggctatcagaaaggaggaagcagaacattttatatagggaagagaatagtaaaaggactctggaaatagctgtggcttatttttttatttttattaaaatggagtctcactctatcacccaggctggagtgcagtggtgtgatcttggctcactgcaacctctgcctcctgggcttaagcgattctccagcctcctgagtagctgggattacaggcatctgccagcacgcccagctaatttttgtacttttagtagagacgaggtttcaccatgttggccaggctggtcttgaactcctgacctcaggtgatctgtccacctcagccccgaaagtgctgggattacaggtgtgagccactgcatccggccagctgtggcagacaggatgagactgtctcaaaaacaaaaataaaaaacaaccatgcttaggccctactcccagagattctgttcatttggtatggggatgaggtctagccattcgtaatttataaatctccctacgtgatttgaaatgtgcatccagagttgagaaacattgaaaaggcttagagcaatggccaggtttatttccttcttgtgggttttgcactagctgttccctttacctggtatgttcttctctaggtctttccatgaatccttgttgtcattcaggactcagattaaatgttacttcctcaggaagaccttccctgatcccccaacaagctaaaataacacacctacatttatcacactgtcttgctattaatagcagttcctgagatttctctatttatgcttattgtctgtttttttccaactgtcatataagcatcttgagtaaaggcactttgtcttattcactgctgtatccccagcacttagaacagtgcctggcccctataggtattccaatatatgtgaatcaaagagaaaaaggtcctttaaaataaattattttagttcttccgatggctgttttcttttcttttctttttttttttttttttgataagagtctctctgttgcccaagctggagtgcagtggtgtgatctcggcacactgcaaccttggcctcctgggttcaagcgattctcctgcctcagcctcctgagtagctggaattacaggcgcccaccactacccccggctaatttttgtatttttagtagagacagggtttcaccatgttggccaggctggtctcgaactcctgacttcaggtgatctgctcgccttagcctcccaaagtgctgggattacaggcgtgagccacctcgcctagccctgacgcgtattttcaactggcttttaataaaatgtgttttaattatgcaacataattgaaccacccatgaaaaaagcacacactgattttttgtaaatatatcttaattgcactgggttcattctcttcacaggaatctatattaaatctgttgcaaagcaagtaattatcctttaatgtatttttatacatggtatttgttcctaatgttgcttcttagggaatacagttcacatagtagggcagctgggtatggcaggatacatttattaaatcaagggattgctgcttagaacttttgtgtttgtttttggagacagaagacaggaaactgtaatttttagaagagtaaaaaggtatctcagggagcaaaagaatcacaggaaaactcgaaggctctgattccttctaaaagagggacacatttaccctctattcttctgggggcacctctttaacaaatgaatgtaatctggcggaagtggggagtttcaattttgggtggagatacagtagttgagattactacagtgtcttgtttcgtagaggtgtaagccagtgcggcaaaatctccaagcttggtctcaaggaggcagctgggtctaacttacaactcaggcaggtgatttgagggcagtgcagctgtccttaagtcacccgcgggccatttctgaaatgctttacttacgaaaagatagaacataacatctgttgcagggggaaaatgagatttcgtgtcctgacccgcgtctgcggcagggacctgagttcttcctccaagtcccaaatagccaaccttcgcccccggcaacagggctaggtgcacgagcaaccagtttttcaggcagccgcctcctctttcctctctcgccgtacttcatcgattacggctagaaacaaaacgactttgtatacggagtaatggttgaaatctcactggcgcctcagcaggacgggcagccagatccgcggctttggagaaggccagcccacggtcgtccgactgaggcgacttgagcaagaccaaaggcagagccgcccgagaatgaaagcagcgaagcccgagtggcggtgcattctgggagttgtagtccctgcgagacaacgccgtcccgactccaccaggctctgcactccatctcccagccgaccccgcgccgcggaggaggcgagcttggtgatgagctgccccagcggtagggggcctggggcggagaagccgctacagccgcggccgggcgacgctgacatctggcatccctggggtctcagagacacgggtggacagcgacgagggccttgtggccgccgtgtgtacccgtgcttaccctctgtcctccctacaggcgcgcggcgtccgccatggaagcgcatccgaccgctggggtctctgggtgccgcggcctcggctctccggggcgatgagggactagaggcgccctgaggcccgcctgcctcccgcgctctggccaccccggcgggaaaaggatcgggcgggcgggcggtcccacagtgcccgcctttgcgccgccccaccccctgggggcgctgccgagggggcgccagccgcccatgccgccccggcgcccagccgcgcctggcgcccgccgctgaagcgcaggacgcgccgccgcccgcgctcaccgccgtccgcgccagccgccccgagccgactgcccttctgcccccaagatgtggcacagcgtcgggctgactctgcttgtgttcgtggccacgctgctgatcgtcctgctgctgatggtgtgcggtgagtgggggcggtagccgcgaggcagttccacacgccgggtcgctgatctgctggggttttttttgttgtttgtttttttgaaaaaaacaaaagggcgtggacggacaattgtcttaaaatcaactgttgtcccttagcctctagggctgagcgcagaggtgggccctttactcatggccggccctcgggcatcctggggagggaaaggacaggctccagggcttcctgcctctgagtgaaactcagccttgcttcaccggcagcgtctgctctttcattctcaccacaggctgcccagattgtaaccttggcctgcattcgaaggtgaagtgattgattggtcctttttcatttgcacagattctgaccttaataatgagaggtgtcaccttcgtttcatcagcgagtggggtagagttgggttttcagcacgcgtgaaattgtttacttagagttcagccttaaactcaattccaagcagagatgtggagaccaggcagagcttagaaacaccggctatattaaacttgcagggtcgggtaacctaactctcagttctataataatggtgctatttcgaatgctgtgcgtattttccttcttggaatgagaggacgttcaacttttttcttcaaataatggtagcccaattttagatctttttgatttctttgtacatgtatagtagctgataaccacaggtctcttagcaaagtggctaagcaattgtgaaaatctaaaaagtacgtagaacacgtgtcagtgagtttacacatatttataagactgaagtatgggttcaggttgatgtaataatgggtcagaattcatacagatactatagggcttgttcattacacgataaatgtacaaattaatacttagtgacgctgtggaatatatgtgtgcacttgtgcatatgcatgtgtatgtatttataaacttatatgtttattttattttttgagatggagtctcgctcttgttgcccaggcaggagtgcaatgcagtggcctgatcttggcccactgcaacctctgcctcctgggtttaagtgattctcctgcctcagactctcgagtagctgtagccgggattacaggtgcccgccaccatgcccagctaatttttgtatttttagtagagatggggtttaaccgtgttggtcaggctggtcttgaactcctgacctcatgtgatctacccgccttggcctcccaaagtgctgggattacaggcatgagtcactgcatccggccttgtatgtatgtttaaaatttgttgtgcttttctgtaacaccaggttaaagcttctaatttacagcctttcttttctgatgagataaagcaattgaataacctttctcaattttctgcttgtgatatcaacaagcagaagaatattagaatattgaactaattgtagatgtttaaggttcttgaagtaaggaaaacaaaatccttgtgatatgtttggatgtggggaaggagggaaagcatttattaccctttctagtttgaaaatgcgagctacctggacatgggaatgaatgtgacacgtagaccctaccataccttcactaggatatttgccaaatttacctttatggcttcagaaatccaaattgctctctcatctctaaacagctgtttgatggtttaattatacacatttttctaaaagtgcttttagtttcagaaacattaaggaataagagagatgaggtgtgctaggacagcagtccccaacctttttggtaccagggacttgttttgtggagaacaatttttccacagacggagcagggatggttttgggataaaattattccagctcagatcatcaggcattagttagattctcataaggagcgagcaacctagatccctcctatgtgcatttcacaatagggtttgtgctcctatgagaatctggtatgtcgctgatcagacaggaggcggagctcagatggtaatacttgcctcctgcagggaggagggatctgtgtgctagggctggagagccctgtgctaggacaccttagtttttggaatagtcaagaactaaaagctctatgatgaagtgatcaatactttttttgttgttgttgggagaactgatgatggagtagcctcatcttttgactaggatggggcgggaacttggggagaggaggcaaggatcagaccagacttaagagagaaattggagtgcgatattagtttgccagggctgccatgacaaaataccagagactggtgggtggcttaaacaactcatttcttttctttgttttgcttttttttttcttttttctttttttgagttggagtttcactctcgttgcccaggctggagtgcaatggcgtgatctcggctcaccgcaacctctgccacccgggttcaagcaattcttctgcctcagcctcctgagtagctgggatcacaggcatgcgcctagctgattttctgtttttaatagagatggggtttctccatgttggccaggttggtctcgaactcccaacctcaggtgatccacccgcctcggcttcccaaagtgctgggattacaggcgtgagccacagtgcccgtccccagtgcctggctaattttgtatttttagtagagatgcggtttctccatgttggtcaggctgatctcgagctcccgacctcaggtgatctgcccacctcgacctcccaaagtgctgggattacaggcatgagccacccatgcccagccaaacgcatttatttttttacagctctggaagctaaaagtcagagatcagcagggttgattttctcctgaggcttctctccttggcttgtagatggtggtcttctccttatgtcttcacatagtctctcctttgtgtgttctaatctctttataaggacatcagtcgctggattatggctcctcaccctatgactttatttaaccttaattacctctttaaaaatctttatctgcaggccgggcatggcggcccatgcctgtaatcccagccctttggaaggcagaggcaggcagatcacctgagatcaggagttcgagaccagcctggccaacatggcgaatccccgtctgtgctaaaaaaaaaaaaagaataccaaaaatttgccgggcatgatggcacatgcttgtaatcccagctgctcaggaggttgaggcaggagaactgcttgaacccagtaggtggaggttgcagtgagccgacattgcaccatagcactccagcctgggtgacaagagtgaaactccgtttcaaaaaaaaaaaaaaaaccttatctccaaataccgtacagtcacactgggggttaggatttcaacatatgaatttggatggcacacgattcactctataacaagcaccatgtctttagcactggctgaaagctagggagtagctgtatgcccataaaacagttgtttttacccttctagcggtcacaagcccttttgagagtctggtaaatgctgtgaacctttctttttttttaaaaaagaaaaattcacccacataacttatctgctccctgctcgccgcccccccacccaatttctgagatttcatggactcctcttccttgaatacaaacatggagttcagatcaagaggctctgctctttgggctgggtctcctgttttcttatttcattcagttcaacaaactgaatattgagtgtctaccaggaactgggaacacagttcctgtccctaggaatttatgtagttttctctagagctctgacagactccttcacctagtgaattctgatgtccaaagttcagattcctaggcaggtttcccttctgtctacattggttgtctctgctttctcacctctcattcattccaaggtgttttctacccccactattcagtgatgctgctgttgtcaaagtcagtaacagatggcctccatattacccagcctgtggtggtcgcttcttagtcctaactgagcttaaattgtcatattcattccttacagttaagtgatgtctgctagaaacatttaacgtttcttttatttactttttttgagatggagttttgctcttgttgcccaggctggagtacagtggtgcaatcttggttcactgcaacttctactcctgggtctaagtgattctcctgcctcagcctcctgagtagctgagattacaggtgtcagccaccatgcccagctaattttttgtatttttagtagtgacggggtttcaccatgttggccaggcttgtcttgaactcctgacctcaggtgatccacttgccccgggctcccagggtgctgggactacaggcatgagccaccatgccgggtccattcaacatttctttggcttttatatactgtatttccatgatgttcttcctaccacagtggctattattttttcttagcttcttctcattccctagaattttctttttttgaccacaacctacaatagaaaatagattattcctaatatgttcataagtgtacagattacatgtgttagtccattaatacatctatttacttatcatcgatctctgaaataaaatgtttatggactagtacttgcctacttgcccttactgtatgagaagattctatttttttctattatgtttctataatatactgcaaatacatttcccttttcttttactccccaaggtctcctatccagtcctagagatttaaatgtctgctctagctaatgactcaaaaatttgtttctctaactcttatgtctctcctgagacccaggctcaatgcatcagactttttttttttgagacggagtctagctctgtcgccaggctggagtacattggcgcgatctcggctcactgcaacctccacctcctgggttcaagggattcttctgcttcagcctcccgagtagctgagattataggcgcccgccaccacacccggctggtttttgtatttttagtagcgatggggtttcaccatgttggccaggatggtctcaatctcctgacctcgtgatccacccgcctcagcctcccaaagtgctgggattacaggtgtgacccaccgtgcctggcccatactacatgttttacttgtccatcatctgtctcccacactagagggtaaggcccaatgagggcaggcattttgttttcttcactactatatccctgacacctacagaagtgtctggcacatagtagacactcaataaacatttgttcaacaaatgaatagatgaatgctgcagaatacccaagctcctacaaatgaaacacctgatatgcccaatggagatctcaatacaacagataagagtttatttcaattctgttactccagttctcctagtggtgagggtagaggtagagaagcatcataagctttacagacctaaatagccactatatatttttagacattattaaccgtggtagatgctccatccatttctttctctgcttgccattgataatacatttagctgacttaatagtgtggatttatattttgactctgtaaacattattctctgctggttaaatagtgtaatatgaccacactttcatttttacatggttcttcaattttttgaagttaatacataattgcctttttagcttacctagtattactttggtacattgtttttttgtttttgtttttgtttttgttttttttgagagggagtctcactctgttgcccaggctggagtccagtggcgtgatctcggctcactgcagcctccacctcctggattcaagcgattctcctgcctcagcctcccgagtagctgggactacaggtgcctgccaccatgcccagctaattttttgtacttttagtggagatgaggtttcaccgtgttagccaggatggtctcgatctgctgacctcgtgatccacctgcctcggcctcccaaagtactgggattataggcatgagccacggtgcctggcctactttggtacattgttatgtgccccctaccagatgttccacaatctcttacactcatcagtggtatttcccacgtgttcaaatggattgcttttcccctccttcccccacccagatccagaaccttccttctttctcaacagctgtcattctgcagaaagttgtactttctctattatcctcttctgtaccctgttttctggatctcatgtcattatctttttcagtttccattctttttttgttggagcacattttctagtagctttctaggaaagaatgcatgaaaaatttttttttgagctaatgcatacctgaaaatgtctctatttatttatattttacctttatacttgattgataatttgaatagattttggggttatagattttcacccaaaatttaaaaatggttaccccattgatttcttgcttctaggtctggtattgaaaaatttattgccttctgtttccttgtcattatacatgacttggtttctctttcaagatgctttttggatagcctttttgtcattgtatactgaaatgtcataatgatgtacctttgtgtgtgtctctttcatttttctaggtcccttcagttcagattttttcctcatttgtggagaaattttctactagatttgtgatcaatttcctcctctccattttcttttttttttttttttctgttctctctgaaacttctggtagttgtatgctggaccttttgggttgattctttaattttatctttttatctcctaattccctcctccccctttcttctggaggatgtttggggctttatcttctgtctcttaaattgagtttttaattttagctgtccagtttttaatttcagaacttggttgttctatgtttagcgttggacctgggctgatctgtgactgtgtgatcaagtcacacagctagcgttgccgcttgctagctgtgtggcttgaggaatgcagtcaacctctcttatttcagcaagtagataaattcacaaataattcaggaatactgaggttcgactttgtttctgcttatttatcttacattgaggtactataactgtaatagagctgtttctcgcaataccaggttgcagtgaagaggttctatggtagggcttccgaaggaggagatggaaggaaacaccaaatccatcttggaggggtttggggctagggtttaagggttttggagtgggccgattgattggtcaaagagtgcaggggtgaaaccatggaacagggagatgaagacactattctcatgctgatttgattcctctgtagggtgtctttaaactggtcttatactggtgacagctgttttactgtaattccagaacctgaaaaacatcttaagcaattcttttttttttttttttgagacagagtctcatctgtcgcccagactggagtggagtggcacaattgccgctcactgcaacttccccctcctgggttcaagtgattctcctgcctcagccacccaagtagctgtattacaggcatgcgccaccacaccctgctaattttttgtatttttagtagagacagggtttcactatgttggccaggctggtcttgaactcctgatctggtgatccgcccacctcagcctcccaaagtgctgggattacaggtgtgagccaccacgcctggcctcatctttagcaattcttaaaagccttataattctaactcaaaaatcttatttttaggaaccatggagatgtaaatggacagtatctagtgtattgtgacttttggttacaagaaaatgggtcaaaatgcagcttgattaatgcttaattataattatgtttctgtccagaattctcattaaccctgtgaggatggcttcagtacaggtggatatatatgaattaattgacttttgaaaaatcaatttttaaagattaaatttggttttagaaatttaaactatccttagattaatacagttttatttaggataatgtacacctttcaaagatagtagattgaggtaaaatgtgttgattacagaaaagtgtgaacaaattttgtaggttgtctagttcattggttttcctacaatctgcaaagatgtgttaagaaatcaacttaggcacattagcattttagagagtttatttgagcaagggtgattcatgaacaggcagggccaaactgcaagcaactgggtctctactacagaggtacaagggggaaaattttataaggttcccacagaagcaagacaaagaaaatacttggttaaagttgaaaggacctagttagaggttagatggtggtttctaattggttaagcttgtttggctgtttacactgagtcgggtgttagtttgcttggtgctggaacctaaatggtggaactgttaccagcagcaaatccaatgggtctgcagcagactccatccttgccccccggaggagaggagggaatttggccggggaggcgtaaggtagcatgatagtccaaggcaagttttatagcaggagtaaaagttttagagcaagaacaaaaggaagcaaagtgcacttgaagagagccaagcgggtgacttgagagatccaattgccttggtaggcccttgacttggggttttatacattggcattgttccggggtttccatttctcctcctctgatttttctttggggcgggctgtctgcatgcacagtggcctgccagcacttgggaggggacgcatgtgcagtgtttttactgaagttgtgcacgtgttcactggaggagtttttcccttaccagtcaagccttcctaaaggaaggtcatatatgagttaaatgccactattttgcctcttagggtgcatgcttgagcctgcgcacccaactcctgagatcttatcaggaagtggctgatcaccagcttcaggtgtttcctatctattgggaggccatcgttccctggcgccagctgccactcattattatgttagagacacagcttaacaactgcctcaccatcacctgatggttgcctgacattcctggtgagggggccctcccctgccctgctcatgtctgactagctacctgctccaacatttccccccctcaagagtccaagacccaattatctgggaaaatggacgaaggtcagtcttctttaactgcttcctgctgacagaggggctgtagtggttgttctgtgggtcttggcctcttgctagctgtcagggcaggatggctctgtggattggcaaaaaccatatccagccaggtccacgggagacggggcaggatttcgcctctgtcgtgttccactagcgagcagtctaggggtcctccttagaagggtgactcttgaatattgcgaggatggcgtcctgcactgagattcgtctggagctttatggcctgaaggcgagaggagacaaattgggttattagatttaggagacatggaccaaaaaggagcaaaagtaggagactaacaagtgggcctgtaaggggaagaacccaagagaaccatttccaagttccttcccaatttaaccaaccctgagtggctcgttcccgtaaactggaggcttgatttaggagttgtctgatgttgtcttgtacttttcctgattgatttacccaaaagcaacatttttcatctaaggccaaacaaattcctccctgtgctgccgttaacatgtctagtcctcgacgattttgaaggactacggctgctaaagagtcgatttgttcttgcatggtcgttaaggctttagccatggtgtcaatgttgttggctatttcctttgagagctggctataggtgagggaagcttttgtgattccagcaattccggttcccgtaccagctagaatgccgagtcccgcgagaaggggaatgaaatggattgccctcctcaccctgggcaacggggaattcccatagattggtattggaagagagagattgccaggggctatgaagatgtctggggttacatagcctatggtacaagttccagtccagttactggggaggcattggtgaatcgactggccacaaatataaaaggctccttgagttttaaggcatgtagagatatggaaatgaaataagggggtgagggaggttccaaaaaattctgagactgctgatatgcccaggtagctggtggctatagtcatgcctgctaagacttggacgcagggtgtttggctctggttagctcccttggttttattttcccaaaaaagagaatttcgagtttggtccaatagaacccattccgctgtagagctgaggttggaaatttgcagacattggttataatcagcaggccggaaccagaagtttcgagtactgcatgagcttgggcgtccctggcaaaaccggctggatttatctagcaaagttccctgaggaaaagtaatatttggaggtttggggaatcttggttgatggcggaattggttgtgggtgtatgtttggtaagtctgttggttagaatctacagtgaaagtaacattacagactgtacttggaagagtgcctacatttgttccatttttccttttggccataacacaaataggggctattcccattaggttgatattagtaaagatgggtccgaaaatgggaggtttctggcggatatcagggaaatcttgctttactgttgaaagaagactatttgcaggcctcatcagtcctttcagattagggtcccatcgataggaaatatgtaattccgcctctatgcttgtccattctctgggcgaggctggataagctgtccctggtgtttcagtggaagagctagtacataaccagcaattggtggagtaaggggatcctgtactttggagcagttgctgagctttttccaataacgggaaatcaggatggcggtaggctgctagtgaaggcgtgagaatgagaaccagcaggagcaggcccatggtgacctaagagaaactggtcacaaaacgagctgccaatggaactcctggtggtgtacaagttagggttaaaatagtgataacaatcagagcaattgccagtaaaatttctagtattgggatcaccttactttgaggtgaaaggatgttggtggggcattacttatctttttgtttaaagaggaattttagatcttccagtgccttgcaagtgtattccggagctgaggttgctggttctggctctggagtttaagggcttttccacagcttcacttgggtgtgatggatctagctggcagtctccagtactgtaatggctgtaggggtagataatagaatggtgaaggggccctttcaaataggagtttgttgggaatttggggttccatccttccaggcgttaatgagaagttgtgagcctatggggtatagaggtggggatttttccccttcagatttcaggtttgtttgtaaaccatattcccagagagcctgttagaagcctgctaaagaagaaacatagtgggtgattttagcagtttcttcatctagtaatgacagaatataggaatggcctaccatataaagccttgaaggggcttaattgcaagggagccttaggggcagcaaatcagaaggagggctaaagctaagaggtacacccatggctgtgctgtttcctggcagagtttgttggggatgtgtttgagggtttggttatttccacttttcctgaagattacagtctcctggcagagtgaagctttatgtccagggcactactaacctgttgagttaattgggaaatgaaggatggaccattgtcattctgcaatgacctgggttggctgaactgaggaatgagttcctttaggaggaatttagctacctcctgtgccttttcagtccttgtgaggcaggcttctacccatcctgtgaaggtgtctacacagaccacgaggtacttaaacctgtggtatgcagggagctgagtgaagtccatctgccagtcctccgcagggtatgtacctctcctttggattggacttactgatggagagggcttccccgtctggggattatttatagtgcacaaagtgcaggcttgacaaacctgttgaatagttttatttagtccctcccccactgaacactggtttacaaatttgccttagactgtctcttctaaagtggcgggagtcctgtaaactcttgatggtttccattggtaggctttaggtagacggagaagttctcccaacctatatcatccattggtttcttttcaatacccatgttgggtggcccaatctgtttcttccttaatgtattggagagagagcagttcactggggagagagatgagcaaggcccccatgaaggtatcttttgagatgcctgtctctttagctgtttagttagctaacctatttccctatgcagtttcattagagcccctttggtgtcctttactgtgcactattgtcacctcctggggcaaatgaacagcttctaatagctctaagatttgaggcccatatttaatttgagtatctggagctgttaggtacaccctctccttccagatagctgtgtgagtgtgaagaaccagaaacgtgtatttggaatttgtatatactccttttctttcccctagtttagggctttcgtcagcacagtgagtttggctaattgcacagaggtccccggggacagagctttaacctctgtaatttgttgaagggacattgtaccatactctgcatatctagctctatccctgacaaagctattcccacctgaaaaccgtatgtcatgtggattatctaggagctgatcttttaaatcttcctggctggcataaatttggttaagtatctcacaacacaaatgtggtgttatggtctcctggtagtggcagtaaggaaactgagttaagggtggaacactgctcaactgttacctatgggttttctaacaacaagacttggtactttaggagtctgttttcagacacgttgtattctctgtctgcaaggaagtttggtgtttggactagatgttggattcccagttctcttgttggggagcagattaacaggtcatccatgtattgtaggagacactctctcctctcaagacttaggtcctgcaaatctctagccagggcttgcccagaccaatggggactgtctctgaaaccctgttgaagcactgtgcaggtgagctgttgactccttccttttcattctcccactcaaatgcaaatagaaattgggaggatgggtcgagggggagatacaaaagaaagagtctttaaggtctaagactggaaaccactgagcatctggaggttggggaagaattacatatgagttggggatcattgggtgtattgggactactgcctcatttatgattctcaggtcctggactagcctgtatttttcattgctctttttaacaggtaagatggggtgttatagggtattaataatccatgtttttgaaatttttcagtcagaagctgaaatccctctttggcctccagctgaagaggaaactgccttctacaaggatagctagaaggattcttgggctgaattactataggcattgccattatggcctttcctgttattcctgaggcccagacctctggataaatgggaaggtctgtgaacagttcatccttgtgtatggtttccttgaggcataagattgcatttgaaaaagggggtgttggccctggaggaaaggttaactgagcccctagtctgagcaaaatatctctacccaaaaggtatgtagggtattctggcatcactaaaaatgaatgagaaaagacggttttcccccagagacagcacagaggaggagtaaacctccaggttacgggcacttcatatcctcccaggaggataattgcctgggaaaagaggtaagcattgagcaggcagccctcatgtccaaaagaaaacttacagtcctactgggcacatccaaggcagcccttggctctgtcccttcaatagtgttatttaatccaggagccaagtggagcgtagggcccccttcagctcaaggagctgaaggtcatccagttgggatgtcctgagggcctttcagctttcagggtagtcctgtttcccagtggccaagattgtggcaattggagcatggagagctgggggtgggtgtccccatcagtttgggcactgccttcttgtgtggcctggctccccacagaagtagcatttgggcaaagggatctccctggggcctgccagaggtggctggcaggtttgcagggcagtcagtagttggagctgttgcttttccttttgcctctccttttcttgagccctttcctactcctcctggttttggttgtaaaagaccaaggaacctactttgcagatgtcaggcataggggtactgggatccagtgctagtttctggtgtttcctcctaatatctggtgttgtttgagttagggaaatgatcctttatgaacagttgtccttctagtgggtctgggtctaggttagtgtgtttcactagggcctcttctagcctgtctaagaaaatggtgaggttttcataaggcccttgatctgtcaagcccaatttattacagttcacaggctttgctctgctagctttcattccttctatcagatagaggaacatgtgggtccttgctcatgtactcccctggatattgtaatcccaattggggttgacctggggaactatggtggcccccacagggtagccaccagtgtcaggcatgtgcattgtgtttgcaaattgttggaccgccaccataatggagtcacattctcccttaggcagagtttgccctagtatgactgagaggtccctcctggtgagttcagatgttaagcccagtttataaaacactttgatatatttgtcagggtcctccataaacttccctagttccattttaatttggctcaggtcttgcacagtgaatggagtctggactccagtgggtccactgggaccactaaacctcctgaatggggcataacttaaggaggtggtgtccagaggatggccctgggtagggaggagaaggcttctgggagacttcgatataattgggtagaaggggcaatggggcttgagctctgggtaaacctgatgaggggccttctgaaccaatgggaaggggctgcatgactatggccatggatctgttttacaagcccaacaaaggtcagggttgtttcttagggccatgaaggccagcacataggggatttctgtccattttccctggtggtagcaaaacaaatctagttgatggatcatatttaaatttgtgcttctattttctggccaagattcctggtcctagagcttttattcaacccaggctgtattacagaaaaatattagccttttcctttttagggtttgggagtcaaacttttcccagttcttgaggatgtatcctagtagtgtgtcctgtggtacagagacttgattacctgtccacagagagaacagaggagagaagagaaaaagaaggcaacccctccaatttccctactgtctttttcctgaacttacagcagaccagagtgggtagggcattaccccattcatccatttttcctttgcgtatggcagtgtcccccattcattctaggggttccagaatgaaccagtgcttaccaggtacccctaaccttggtcccatcttgttttattgaggcacaattacccgtttgtaaagaaagaacagaggcgagaagagggcatctccccttgttctcttaatcctgtgcctatggcagactacagtgaacagggtgccctcccactcatccaaggggttctggaatgaacccagtgtttactgggtacccctaccctgatcccatcccatttctggaccagccttcatctgtgttgcagtggtaatctgttttgtgtttgtagcctggaactagtcttcatctctgttctatgggtactttggtctcttgcatctgcctccttgggctgtcctatatccttgtctccatgaccttatagtgacccttgttcagagcattctagcaacagaatgattatctcttctcagattctcatttcccatgttctttaagaagacgagaagcctgtttttctgccaattgctgcaagggggctggacttctctcccttcaaatataactttgaaggtcctgatacatattgagaagggcctggaggtgattagaggaatggaggaaaatttgtatttgggattcttcatcctcccagggtaacatgcagaacaaatgcttaacgaggtagaacaatccctctgctacaggagaaagcgggaggaagcaagaggaatactcatggaaagccttcatatgtttgcagaaacagcagcccttggatttgagagggcaacgtttatttgccctcttgatataaaggaggaacctctggaggacttggtgtttgggataagaccctgcaaacggcagagaattttccttccccacaaaggggtgctaactcagaaaaaaagcgagtgggtggggtccttaagggctacagagtgaggtcctatgcaagcaagcaaaccattcaaaagccagggagaaacatggccctggagcataacagggatgaaaagcatatggtaagtcataaggagctgacagagctaaggttctgattagtgtctatcccggcagtgagccaacagacagggaaagggttggaggtcatccgagctggtagggtaacaagtataaatatcaagggacatccgtaagggagtccatctcttggttgccaggctaacacagcaagagctgcgggtgcatgaataacaaatagggaatgtgtgtttaaggcagagaagaaagttgcagggcatgcaaagtaagaacagagaaaagacagacttacccccaaggcagttggtccaatgggtgtgcgaggtcattttggaatacatacagagaaaggaaaataggtggtggtgggtttttgggaaagagctgattttagttgaaaaagcagaggaaaccccagatactacatggttgtaggttttagccctaccgctctcatcagcctcctgtctgggggggccattagtgtctcaggtctacttagtgcagactccaaggtccttcccacccctgcaagccatccttcggggtgagcagagagagcagccagggggagcagagccactgtggttgagaggaatcgttccaggggtaggttagtaagcaggagagtgaaagaggagaacgaaaccacgtacgagggttgaacgcctccagccgaagaaggcaaggcgtagaggtgtcttaccactagggaaggtatccgagtcactgcaccatttgagagatccaagtgccctgttcagcccttgacttggggttttatacatcggcatggttccggggtttccatttctcctccttggatttttttccttggggtgggctgtctgctgtgcagtggcctgtcagcacttgggaggagccacatgtgcatttgtttactgaagttgtgcgcatgctttcttgagacatttttcccttatcagtcaggtgttcctagaggaaggtcacatactggttaaactgtcattttgcttcttagtgcgcatgcttgagcccacttgcccagcttcggagatcttatcaggaagttgctgatcaccagcttccggtgtttcctgtcttttgggagactgtctttccctggtactggctgcaacccattattattattttagagaaacagtgtaacaaccgcctgatcatcacctgatggtcgcctgacattcctgagctgggggccctctcctgccctgctcatgtctgcctgactacctactctaacagaaccagcttaacctaatggcctcctgatagaactgcttgcttttttttttttggagacagcctcgctctgtctcccaggctggagtgcagtgatgcaatcttggctcactgcaacctccacctcccgggttcaagtgattcttgtgcctcagactcctgaatagctggaattaacaggtgtgcaccaccatgcccagctaatttttgtatttttagtagagacaagatttcaccatggtggccaggctgatcttgaactcctgacctcaagtgatctgctgtccttggcctcccaaagtgctgggattacaggcatgaaccaccacacctggcccaaactgctttccataaacataaatttacctttctaatgtaaatcaaatcacacaacatgctttttgtgtttgacttctttctgctagcataatgcttttgaaatctatttgtgttgtgtatatcagtaatacattcttttgtattgctgaaagagtattccattgtatagatataccacaatttgtttatccatttactcattgatggacatgagagtggtttccagcttttggctgttagtattattattgttttatttatttatttttttgagatggggtcttgctctgtcgcccaagctggagtgcagtggtatgatcttggctcactgcaacctttgcctcctgggttcaagcaattctcctgcctcagcctcccaagtagctgggattataggcacctgccaccatgcctggctaatttattttattttattatatatttttttgtatttttagtagagacggggtttcaccatgttggccaggctggtttcgaactcctgacctcaagtaatccacccgcctgggcctcccaaagtgttgggattacaggcgtgagcctgtagtagtagtattagtagttagtagtattattaacattcagttgcaaatcttggtgtagacatatgttttcatttctcttgagtaacttcatttctcttgagaaactgccaaacatttgcattgccagcagtcatgagtgagaatttgttactccgcatccatcaccaacatttgatggtattgtctgtttttaatttagccattctagaggatgggtattatgcttttgatttttgtttcattaatgactaattattttcagcatcttttatgtgttatttgccattctttctaccttctgtgtaaatcatctttacaagttttttctactcatttaaaaaattgtgttacttttatcaagttgtaaacaattctttattctggatacaagttttttttgtttgtttttatcagatatgttttgcaagtattttcttctattctgtagcttgcctttttatttttatttttttgagatggagtcttgctttgttgcccaggctggagtacagtggcacaatcttggctcactgcagcccccgcctcctgggttcaaaaggttgccctgtttcagtctccccagtagctgggaattacaggcatgtgccaccatacctagctaatttttgtatttttagtagaggcagggtttcaccatgttggccaggctggtttcgaactcctgatctcaggtggtccacccatctcggcctcccaaagtgctgggattacaggcatgagccaccgcacccggctgcctttttatttttaaatgtcatttgttttgtgttgttattgtttgataagtccttcttatcaagtttttaaggtatgacatataaagttattctttttgttttttttttttaatttttttgagacggaatctcactctgtcgcccaggctggagtgcaatggcgcggtcttggctcactgcaacatctgcccccaggattcaagcgattctcctgcctcagcctcctgagtagctgggattacaggtgcgcgccaccacgcctggctgatttttgtatttttagtagagatgggatttcaccatgttggccaggcttgtctcaacctcctgatctcaagtgatctacctgcctcgccctcccaaagtgttgggattacaggcagttgaaggtagttttaccttttcttcccaatgtgtacatttgtcttttagcttttgcctcattgcactggctagggccttataatgttgcaagaaaggagtgagagcagaccttcctccctgatcttttggagtgaaatatttagccttttaccattaaataaattattagctgtgggattttaatagatattctttatcaagtttaggaagaaaacttcccctctgtttctactttgtggtgatttttcttttttttttaaatcaggagtggatattggatttttttttttaatgatttttctgtattgagatggtcatgcactttttctcttttttttttttttttttttttttgagatggagtctcactctgtcgcccaggctggaatgtggtggtatgatctcggctcactgcaccctcctcctcccaggcttaagtgattctcgtgcctcagcctcctaagtagctgggattacaggcgtgtaccaccacacccagctaatttttgtattttttagtagagacggggtttcaccatgttgatcaggctggtctcgaactcttgacctcaagtgatccacctaccttggcctcccaaagtgttggcattataggcatgagccaccacgcccggctgtattttttctcttttaagtctgttaatatggtggattttgttgcatttcgaatgtgaaagtaacccattcctcagataaacctgttttggtcatgacatgttatccattttctatactgtagcaattaatttagtaaacatttaagatttttctctttatattcatgagaaatacttgtggttttcttaaacacccttgtctggttttgtcatcgtgttaatgcagaccttattacatgagttgggtactgttcctgtctctttggatttttggaagcatttacatacaattgctatattggttttctattgctgcataacaaattcccataaatttagcagcttaagacaacgcacagttattagatatcagtttctgtgggtcaggagtctccacctggcttagctgggtcctctgctcctaaagctgcagtcagggtgttggcctggctgcgttcctttctggagcttgggttcctccttcaagcttatgtggttgttggcaggattcagttccttgtgactgaggactcaaggtggctcacctcttcatgccagttgaatctctgacaccagggagggtcccaatccctcttttaaggtttttacctaattgagtcaggcccacccaaggtaatttcacttttgaataactaaaaatcaactgattgagaccttaattatagtttcaaaatcccttcatctttaccaaataatataacctaataaagggattaactatcccattacctttgccatgttctttctttctttcttttttcttttcttttttttttttttgagacagagtttcacttttgttgcccgggctggggtgcaattgctcagtctcggctcactgcaacctctgcctcctgggttcaagcaattctcctgcctcagcctcccaagtagctgggattacaagcatgggccaccatgcctggctaatttttttgtatttttagtagagacagggtttctccatgttggtcaggctggtctcgaactcccgacctcaggtgatccaactgcttcggcctcccaaagtgctgggattacgggcgtgagccaccatgccctgccggccggccttccttccttcctctttttttttttttttttttttttttttttgacagagtctcactctgtcactcagactggagtacagtggtgtgatctctgcccactgcaacctccgcctcccaggttcaagcgattctcgtgcctcagcctcccaagtagctgggactacaggcatgcagtaccacacacagctaatttttgtattttttgctagagatggggtttccccatgttggccaggctgttctcaaactctgggcctcaggtgatccgcccacctcagcttcccaaagtgctgggattataggcatgagccattgctcctggccagctttgccatgttctgttggttagaagcagatcagtttctacccacattcaagaggaggagtcatataaagattacacaaaggattgactcattgggattactagagtgtgtctgtcacatttgacataatttctttgtaaatgtttggtagaattcatctgggctgggacttttctttttggaaagattttcaactacaaattctgtttctttattagatattggactattccacttacctgtttcttcttgaatgagctttcagagtttgtgtttttcaggcactgtgtctgtttactctgaattgtataatttacagggataaagtttataatatttcttaattagccttttaacacctgtaggatctgatattgattatttgtgtcctttcttgtttgtttgtaattggcctgactagaggtttataaattttattgatcttttccaagaaccacctttggtttaattgattgttttctccctattgcttgtccatattctgtttcattggtttatgcgtatatctatatatctttccttctgcttattttgagtttaatttgtacttctttttcaagtttcttatggggaaatcttgggttattgattttagacttttcttatttttaagaaaatagacatttaatgataattgtttctttttttttttttttttttttttttttgagacgtagtcttgctctgttgccaggctggagtgcagtggcgcgatctcggctcactgcaacctccacctcccgggttcaactgattctcctgcctcagcctcctgactagctggtaccgcaggtgcctgccaccacgcccggctaatttttgtattttttttttttttttgagacggagtctcgctctgtcgcccaggctggagtgcagtggcgggatctcggctcactgcaagctctgcctcccgggttcacgccattctcctgcctcagcctcccaagtagctgggactacaggcgcccgccactacgcccggctaattttttgtattttttttttttttttttaatagagacggggtttcaccaggtggccaggatggtctcaatctcttgacctcgtgatccgcctgccttggcctcccaaggtgttgagattacagtcgtgagccaccatgcctggccgacgtttaatagttgtttgtaagtattgattttgacgtttaaatttttattcaattcaagatattttctaatttcacttgtgatttctcccttgaaccatggattatttagaagtatgttgttaaattttgaatatttgttcttttccagatatttcgttatcagtttctaatttgacttttttatggtcacacaatgtattttgtatgataaaatttaggagggtttactcttacatttaatgggacttatgatacagaatatggtctatctttttttttttttttctttttaagagagggtctctctctgtcacccaggctggagtgcagtggcaagatctccgctcactgcgacctccgcctcccggattcaagcgattcttgtgcctcagccttgcaagtagctgggattgcatgcccaacaaatttttgtgttttcaatagagatggagtttcaccatgttggccaggctggtctcgaactcctgacctcaggtgacccgcccgcctcggcctcccaaagtgctgggattacaggtgcatgccaccattcctggccaatttttgtatttttagtagagatggggtttcgccatgttggctaggctggtctcgaactcctgacctcaggtcatctgcccacctcagccttctaaagtgctgggtttaaaggcatgaaccaccacctatggccagtatatggtttgcctttgtgaacgtcccatatataatcaaaaggaatgtttttttctgctattgattgaaatgttctgtacatctcaggtcagtttggttgagggttgtttggtacttttgtgaaagggcaccagcagcttttgctatacagtagctactatgttatatagtaggactcttcagagcagacattgagctctgtaatgaatcaattggtcaaattaattaaatcttgatagttttgggagtggggttgggacagggagaataatagttgatttgttttgagtatctactttgtgccaggtgctactttaaggcatagtgaacacactggaaaactgattaaaccatacgtttcgtttccttaagaaacttgtttctcatagggaaggtggtcagtactatgcaggatgaaagtgagcatgaggtgctaaagcaattacccaaaataggtcatattgaggtaatagtattgtagaacgatctaaaagttatatattaataatacttaaaattcttagttacagtggtagtagtctcatatctgtattctttgccttagaggggaggaggttggagcctatgagatggtaacagagctaatatttgatgagtacttattatgttttaggcattcactttagcttgttacatgtattaacttttaattaccacataccctttgagaatgggtactgttattcacattttatagaacaggaaactgaagcacatagaggttaacttgccgaagtcggaaataagttactgagttaggattcatggaagaacattgcagtctaacatgcctctgagatataagaaattatggggacaatccagttgatagatacaaggatgtgatctaggatagagaatgacactaggagtgtagagaaggaaacagatgtgagagggtttattaaaatagaatctatagcactgggataagataaagtgggaacaaaatgctgaagaagaactcttttctgccatagagatggggagagaatgtagttctcccaaagagctgttggatggagacagacagcagacacatgcgcgtgcactctctcctctctctctttctctctctcactcactcactgtttttgagatgtcttcaaactagccaggtagaaattccctcttgaggttcaggaaaggtggaaagtatggatgaaaatttggtcctcgggccgggctcggtggctcacgcctgtaatcccagcactttgggaagccgagacaggcgaatcacgaggtcaggagatcgagaccatcctggctaacacggtgaacctccgtctctactaaaaacacaaaaaattagccaggcgtggtggcgggcccctgttgtcccagctactcgggaggcagaggcaggagaatggtgtgaacccgggaggcggagcttgcagtgagcccagatcgtgccactgcactccagcctggacgacagagcgagactccatctccaaaaaaacagaaaatttggtcctcatcatctataataacgatgatatttggatccatggcagtgttgtgatcaccagaagaagaagaagagaacagaaagaggagagaagagattttaaaaggtaacttgaaatgtcttatgattattggatagaaaagctttggatttggaggtactatgattcaaatttgtattgatttgatagtggtaactccaggggcttaataacttctagcattgcctagtgtgtcattgagaaaggggtgtgtacaatagagggagaattttaagaattagaagagcttggcttacttggtttagtctacatttaggatttggacatactgtctcatagatgagcctttgctgccttcagaataaaatggaaataaggtaataagattgaaaatggaaaagagctttttataaatgtgaaattggtagtgagccagtcaactagctacttagatactatcatgaaggtgagattatataactccactggaatgattccacaatttacaaagatcagaatttgtagttatactgcacctgggcttttggactgaaaataccttgggtagtgtgtcttaatcggtttgggctgctgtaacagaaataccatagaccaggtggcttataaacaacggaagtttatttctcatggttctagagggctgggaaatccaagatcaaggtactggcagatttaatgtctggtgagggcctgcttcctggttcatagatgtctgtcttctcactgtgtccaaacatggcagaaggggaaggagtgagggagctctctggggtgttattttaataaatgcattaatcccattcatgaggactccaccctatgacctaatcacctcccagaggctccacctgcaaatactgtcacattggggattaaatttcaatatatgaattttgggagcacacaaacattcagactacagcaagtagcaaaatcgtattctcattctctagatagtgctttgtgtttcagtcatactgtcaccatgaaaatctgagaaatttgatacgctgttaagattcattgctctgtcttatgtagctggctgtcttccaatgtcatgagtcactgtgtgcctttattttcttatttagaaaatgggaataatgattgctggtctcattcagatgggtcgtgtaaaagcacagtgattgaatgtaaaagcactgtgtgaactgataactgtgtaattgaaggtgaaattacacttctcccctgggtttgtggtgtgttgatagtgatggttcatcactcaagttcatctatcacaacccttctgctgccagcatgtttatcttacatagaaaacaatttacagtgtgtttcatgaaattcatcatttgaacaaatgcttagttattggcacacagaagtgagtgctcttttgcctatctcagaatacacaccctctattgctgattagttattctggcatacaatgcgatactgaagcaagacataaacttccttttaagctgaaaaactgcaaaacccatcttaacaatcagtatattgtggactgtactttgcccctcacctctcctttcttctttcactctctactgtttctgtcttactaaatcccaggacatggttccagacccatgcccatagaataagagttaagaagtttctgatatgtgcactttgggtctgggaattgtataagctatacttctgttagaagtccgctgtaggcatgcagggtgcaatgggtaagtctttttcagaagaaggctgcctgggttttagtggttttacttccttcattcccctgtcccccaaaatacatatgctcacctgggagaagttagtcattagggcccagagtccggattaggttggtctatatttatggttatacaggtgcctctccccctcccaacacacacacctgcatacacacccctctgctgttatttggtgctctcttaccaatatcatgtaaagggtgatgctttattttctattacataactttgcacttgtcttctcttccactcattgtataaaagagaacgagttctgaatgcataagtgctgtattaaacattctattaaccagacataatacaattctacttggagcaagatacagtcattctttatgtccacttctgactatccattatgttggtcatcatatccatggtcctcctgcagcattgctccactcatcagcaatgtctggccagtttctttgttgctccccttacatacatacctacaccgtctcactagtaaatactgatttttgcattaagctgccttttctcaagtggagtcttctcaggttctgtagtcaactgttgttctgtctatcccccatgggcaccccactgctaatctttttcttcttttccttggccagtctccacaattcactggcagcagcactcatgcttctttttcactgctttttgtcttttccaaggctgcatgtccatcgcaatcattctagggagcttaaaaaaaatgaataagcacaatccctggagattgattttgggatatctgggatgagctcttggcaatctgtgttttctaaaaactcctcagcagattttgaagttcgaatgatccctcttatgaaaggtgcagtgtgataatcacatacctttaactagaatcgttccactggataataattctgaacttgccttacttttacaggtgttcctttccctgaaagggaaaatatgaatcctatcctcttgtgaccctaccttgctccgactttgagtggttcctctgccctagaggtggaggactttttgcagtgtggaccaaaagtcaggcctgtgacctttttgcagtatggaccaaaggtcaggcctgtgacctttttgcagtgtggaccaaagatcaggcctgtgacctttttgcagtatggaccaaaggtcaggcctatcttcttgtgaccccaccttgccctgactaagtagttcctctgctctagaggtggaggactttttgcagtgtggacctttatcaaaggtcaggcctgtgttttaaaggaattgaggcagattccaagaagattaaaagttttggttagacattatctaacaaaataattgcctgtctgggtttttttttggggtggctcctgtgatagaggctgtcctccaagagcctattgtctaataaaggtagaggagatatcattactggggatctttttccaggctgttccctctactcccctcttaaatctcaaaaaacacccatgtcagctgggagtggcagctcacacctgtaatcccagcaccttgagaggccaaggcgggagaatcacttgaaccaggagtttgagaccagtctgggcaacaaagcaagaccctatctctacagtaaataaataaaaacatccatgtcctctcagggataggccctatatccatgttcactgtacctgctcctggggctgacacttgaattcagtttagggcagagattctacgttgtgttttttctaggtttgtgttttagaaagctggggggaggaggagcaatctacagagagaagcgtagaggaaaatggagccgctgtgcagagagaaacagataatgctgagcaaatgacctcagttcacgagaaccttctcctagtgcttgtccctcgtaagggcgcttcctcccgtgctctctcagacacctctgtagcttttagtaaattcccctttttttgtttaagctaagtctttggaattttctaacttgaactaaaagctgctttattaaaataacaagagatgaactatgtgtgtgactttctatttcgtgttatatttgtcataagatgattaccaataccatagatgaatagattttgagccctattagcagcaaggagtgtggcataccagaagtgtatgacagaacagtttagttaaactgaataacaatttggccattagatgatatgtgcaaagcattttcttacagttcttatcccagagttttaaaagttagctgttattatttttattgttacataataatcatacatatttatggagtatatatgatatttcaatacatacatataatttaccatgatcaaagcagggtatttagcatatccatcacctcaaacatttatcatttctttgtgttggaaacatttcaaatcttctagctattttgaaatatacaatacattattgtatgtattttttatttttgtgggtacatagtaggtacatatatggggtacatgagatattttgatacgggcatgcaatgcataataatcacatcaggataaatggggtattcactacctcaagcatttatcctttgcattataattcttttattttcttttagttatttttataaatgtacagtaagttattgttgactgtaatcaccctgatgtgctgtcaaatactagatcttattcattctatctaaatatgtttttgtacccattaaccattcccactccctgccccttcagtaccgttcccagcctctgggagctatcattctactttctataagttcagttgttttaattcttagctcctacaaataagtgagaacacgcaaagtttgtctttctgtgcttggcttattttatttaacatcctccagtttcatccatgttattgcaagtgacaggatctcattcttttctttggctgaataggattccattgtgtgtatgtaccacatttttaaaatccatttgtctgttgatggacacctaggttgcttccaaatcttgactattgtgaatagtactgcagtaaacatgggaatgtaggtatctcttcagtatatcgatttcctttttttaggggggtaggtggggaaatacctagcagtgggattgctggatcatatggtggttttatttttagatttttaaaggaacctccgaattgttctccatagtggtgttactaatttatgtacacagtgtttccaccagcactgtacaagggttccttttttctccacattctcaccagcaatcgttattgtctatcctttggataaaagccattttaactgggtgagatgatatctcattgtagtttcgttttgcatttctctgatgatcagtgatgttgagcacctttttatataccttcaggtggtttcttatcagtaatgtccttttctttcaggttgaagaactccttttatcacttgtaggacaggtttggtgttgactaaatcccctagcgggaaagtcttgatttctccttcatgtttgaaggatatttttgctcgataaactgttctagggtaaatttttttcctttagcattttaaatatgccatgccatggccgggcgtggtggctcacgcctgtaatcccagcattttgggaggctgaggccagtggatcacctgaggtcaggagttcgagaccagcctggccaacatggtgaaaccccatctctactaaaaatacaaaaatcagctgggcatggtggtgtgcgcccgtaaggccagctacttcggaggctgagtcaggagaatcacttgaacccgggaggtggaggttgcagggaggcagaggttgcagtgagtcgagattgcgctactgcactccagtctgggcaacagagtgagactccatcttaaaaaaaaaaaaaaaaaaaggcctggtgtggtggctcacgcctgtaattccagcactttgggaggccaaggcgggtggatcccttgaaatcaggagtttgagaccagcctggccaacatggtgaaaccccgtctctactaaaaatacaaaaattagctgggcatggtagtgcacacctgtaatctcagctactcgggagtctgaggcaggagaattgcttgaacctgggaagtagaggttgcagtgagctgagatcgtgccattgcactccagactccagcctgggtgacagagcgagaccccgtctcaaaacaaaagacaaaacaacaacaacaacaacaacaaaatgccatgccaccctctcctgacctgtaaggtttccactgagagattgattgccagacatgttcaagcttttgagtatcttacttgtttcttttctcttgctgcttttaggatcctttctttgtcccttacctttgggagtttgatcattaaatgccttgaggagtcttctttgggttaaatctgcttggtgttctataactttcttgtacttgagtattgatacttttctctacgtttgagaaattctctgttatctctttaaataaactttgtaccctaatctctctctctacctcctctttaaggcctgtaattctcagattagcccttctgaggctattctctagatcttatagatgtactttattcttttttcttttgtctcctctgactgcatattttcatttattttatttatttattttgagatggagtctcgctctgttgcccaggctggagtgcagtggcaccatctcggctcaccacaacctccgcctcccgggttcaagcaattctcctgcctcagcctcccgagtatctgggactacaggtgcgtgccaccacacccagctaatttttgtatttttagtaggggcgggatttcactatgttggccaggctggtctcaaactcctgacctcgtgatctgcctgcctcggcttcccaaagtgctgggattataggcgtgagccatggcgcccagccctggctgcgtattttcaaatagcctgtcttcaaggtcactaattttcttttgcttgatcagttctgctgtggagagactctgatgcattcctcagtatgtcagttgaaagtttcagctccagaatttctgcttgatttaaaaaaattatttcaatctttttgttaaatttatctgataggtttcaaattcattctctttaattttgttgagcctcctcaaaacagctattttgaatcctctctctgaaaggtcacatatctctgggagtggtctctgatgccttatgtagttcatttggtgaggtcgtgttttcctggatggtcttgatacttctggatgtttattggtgtctgggcattgcagagttaggtgtttattatggtcttcacaatctgggcttgtttgtacctatccttcttgggaatgctttccaagttttggaagggacttgggcattgtgacctaagtctttgttcactgtagccatgtttgcattgggaagcatcccaagcccagttatgccgtggctcttgcagacttgtagagtcaccaccttggttgtcttgggtaagatccagaagaattctctgggttagcaagcagaaactcttgttctcttcccttactttcccccaaacaaatggagtctctctgtgctgagctgcctggagctggggaagggataacatagtcacccctgtggccaccactgctgggactgtgctgagtcagactcgaagccagcataacaatgggtcttgattgaagctcatggtgaccactgcctggctgccacttacgtttgctcaaggcccaagggctctacaatcagcaggtggtgaatctagtcaggcttctgtccttcccattagggtggggtgagttctcccctagctgtctgggagccagagccaggagttgggaaacttacaaatttacctggtgctctctattctactgcagctaagctggcaccgaagctgtaagacaaaatccctcccagtcttccctttcctcaaacagagaactgtttccttgtggccacagctgccctaggcccacagggactactgtcttccagccaccagtgttcactcaaggttcagtgtattagtccactttcatgctgctgataaagacatacctgagactgggcaatttacaaaagaaagaggtttaattggatttacagttccacgtggctggggaagactcacaattatggtggaaggcaaggaggagcaagtcctgtcttacacggatggcagcaggcaaagagagaatgaggaagacgcaaaagtggaaacctctgataaaaccatcagatctcgtgagacttattcactaccaggagaacagtatgggggaaactgctccccatgattcaattatctcccactgggtccctcccacaacacgtgggaattataggagtatttgtgtggggacacagccaaaccatatctaactcagcttgtggtgagatttgggtggggacacagccaagccatatcactcagttagcttgtggtgaatgctgtcaggacttagtctctccttcaggacagtgggcttccctctggcccagagcaggtccagaaatgccatctaggagccaaggcctggaattggggacatcaggaggctgcttggtattctatcccactgtagctgagctggtacccaagctgcaagacaaagttctctttactcttttctctcctttccttgagtaagagtttctccgcatagccaccacagctcagaatgtgctgggtcacatctgaggccaacatggctctgagtctcactcaaggccctcagtaagtactgtttggctaccactgttgactatttggggcccaagggctgtctactaagcaggcaatgcatcctgctaggactgggtctttccattcaaggcagcaggttcctatctggcccagggtgtatctggaaatgtcagctgggagctagggcctggaatggcaacctcatgactctgcttggtgccctattctagtatggctaagctgatacccaagttgcaagacaaagtcctcttcactgtctactctcctctcctcaaacagagggaagaagtgtctccccgacctgtgagctgtactgcttgtagttgaggaggggtaatgcaagcattcctttggttgccccaggtggtgtctcactaggttgtgtgccctctaagtccactggctccaagcccatcctagcacagcaccaggacttgtctaggaattttagtccttgtggcttagattccctttcaagtttattgaggtccccagagcactttagcccatggtggtagggcttgctggaactcaggttccagttgctggggtgggcaatttccctatggttaggactggtctagctgctccctctgtgggtacagactgagttctgtcctgtcttgctttctcctatgacaggacagcactgagtttcagtgcagagtcccataataatcactgtgctgtccctcccccaggcatacagattctctttccatggcatgtgactgctgctggcaggggagggagggtagcgtaggcatttcaagactatctttcctaccctcttcagtgcctcttttattaatatgatgttaaaaccaggtactgtgatcgttcacctgatttttgatttttatggaggtgcttttttgtgtggatagttgttcaatttggcattgctaccgggagcgggggggggatgatcactggaggcttctgtttggccatcttcctctgcctccctcctctctaattgtatttttatacccactaatcaacctcttttcatccgctccccacctcaacacttcccggactccgataaccatcattctactctatctctgttagatcaacttttttagctgccacagatgagtgagatgatgtgatatttgtctttctgtgtctgacttatttcacttaacataataacctccagctccatccatgttgctgccaatgacaggattttattctttatggcggaatagtattctattatgtatctgtgccacattttctttatccattcatccattgctggcacttaggttgatttcatattttgctattgtgaatagttctgcaataaacatgagcatgtatgcagatatctcttgaatatactgatttcctttcttttggatgtataaaccaacagtagaactgctggatcatatggtaaatctgtttttagttttttgaggaacttaaatgttcttggtggctgtgtcaaaaatcagttaatacatggatttatttctggattccctattgtgttccgtttgtctatgtgtctgtttttttattagtgccatgctgtgttggttgctctagctttttggtatatttttaattcaggtagtgtgatgcctcctagttgttattattgtcatatctaacatagcagttgaatagcttattggcagttgtatctggcacagtaatacctttcttagtttattctttgctcagtcatacttttcctggtatgtattccttggggctttaataatggttttttccctcaaaacagatgtgtcatgtgtcgttttcccattgagactacctggcatttttagtctcatcctttgttcagactatgaacactctttgataaacagcctgtggtagaagtatcagatcttactagtcctaagtattatgatatggaaacaccctgtcttcctgtcctcctcctgtctgtccccaaaattacacctctgtaagaacttagtcattttacttggaggacaacttgttgaactttcctcaatttagtgaatttactgcaattcttatctaaactacaatttatctctttcctttgtactcccaacctatcattacagtagtcattgtaaaaaaaaaaaaaaaacaacaacaacaacaacaactgggtgtttattctttttggctgcccagtagatgagctccctagttatattaggggaattccatacctcacagtgttttgtgagaaacagtgtaactactacatgttttcccccagccctcacacagcctatacccagacagaattgggagaaaaatgcatactgttcaagcttacctctctccagatttgaggataaaaattacagcagtgtggaattggagtggctcagctggccagggtggggaggggagtggtgatagtagccataacttgcctctccaaactctagagtttttctcattgataccacattctggttctgaattttgacttgagattgaatcccttacattggctgctggcagtgattaccaaaaatatttttttgattcctcttactaaaattggggaagagagagtctgtgatctagctgaatgctcttgtattccaagcctctgaaagctacagctgtccttagttccttaccttgtagatttctgtgctgagagacttactctttcttaaccatcccaagagcactatagtactttatggcaggaaccccactggtgaggccctttatcatagccttttcagtcaaaagacttcctcactcttctttatggtcattttatacattgtagccactgttggaatctttggttttaatgaaatcaaaactatcagtttttagaaagattataattctctgatagtaaatttaccactgtaatatctgtttagatattacaagtgagttcttgtaatattacaagatattacaagtgatcaagtgagttcttttaagttacatttttgagtctaacctaagagttaagagaagttttccttagtatttgttgaagtcaattgaccatgttaatttaggccaattaatggcattgaggtatttacaaaatataagtctacagactattcatgatttatcttaccagtttctttcttatttatcccaattaccaaagccatgttttgttcattgtggaaaaatttggtaagtacagagaaatatatttttttaaaaaaacaaggtgggtctccaaattgatctgcagattaaatgcagtccctgtcaaaattcttgatgccatttttttttttttttactgaaatcgataagatgattctaaaattcccatggaaatgactcagaatagtcaaaacaatcttgaaaaagaacattgatgtattcacatttcctgatttttaaacttagtataaagctactgtaaccaacatggtatgcaactagaataatgataggcatatacaggttaatgggatggaattgagagtccagaaataaactgtaacatttatggccaattgttttttgacaaaggtgccaagataatataatagtgggggaaaataatcttttcaacaaatgatcctggaacagcttgatttcctcatgcaaaaggatgaatttggacccctctcttataccaaaattaacaaaactggattgaagacttacatctaagagcaaaactataaactcttagaagaactacatagatgtaaatcttcatgacgtaggattggtcagtggtttcctagatatgccatccaaagtacaagcaaacaaaggaaaaaatgatgcgttaggcttccttaaaatcaaaaacttaggtgcttcaaaggactttttcaagacagtgaaaagccggcccacagaatgggagaaaatatttgcaaatcatatacctgataagcatctaatagctagaatatactaagaactcttacaactcaataataaaaagacaagcaactaaatttaaaaaatgagcaaaagaaatgaatagatatttctccaaagaagataacagatggctaataagaacatgaaaagatgtttaacatcattagtcatgagggaaatgcaaatcaaagcttcgtgatataccatcatgcctgctaggagtcctgtaataaaaaagatggacaataaaaagtgttggcgaggatgtagagaaattggaacctcatacattgcaggtgggaatgtaaagtgttgaagctgctttgcagtttcacaagtgtttaaacacagagttaccatatgacccagcaattcccttctagatagatacacccgagataaatgaaaacatatgtccatggagaaacttgtacacaaatattcattgcagtcaaaaagtggcaactttgtttcttataatagccaaaagtagaaacttctaaatgtctatcaattgatgaatccttaaacagaatgtaatatatacataaaattgaatattattcaaccataaaaagaaatgaagtactgatgcttacaacacaatggacacaccttggaaacatgggctgagtttgaaaaaccagacacagaggccacgtattgtatgattccattaaaatgacatgttcagaataggcaaatccatagagacagagagtagattagaggttgccaggggcaagtgggagcagggatggggagtgactgttaatgggtatgaggtttctcttggggttgatgaaaatgttttggacttcagtagtggtgacggttgtacaatcttgtggatatactaaaaaacacggaattgtatactttaaaaggatgaattttagggtatgcgaattacatctcaatttaaaaactcaacagaagatacctcagatcccactgcctatggacaaccacaactgacatcaattgagcattttagaaaatgcctaatgccaggcacctaagcccttttgataccttctcattcattcctcactatagctttgtgaatattctgtcagaactggaactcctgacttcttccttggtgttctttccactaattcgctctgcctgttttacacagaattttgggtaaagagagaagatgctaatttggaatatcattaaaataatattttacaaagttgggtgctttactcaaacacacagttgaccaaaaaatatttgtgatttggttcaggtaacactcagcactcaagcttaaagcaaaaacttgagaaatggattaaatctccgaagtttgtctttagtgtcaaggggtttatagtaattttttttccagagatagtaagaaaaaaaacaagtaaaattagaaactccccttacgtatctgtttatcttggcctggattaacacggctagaaaagctggttgtattttgttttcacaaaatatgctgtgtttcatttctattctatgcaaccagagtctttaaagtagacagcatcaagaaaacacgtaagcatgaaaaaccttgttagcgtggttaagttagttaattttatgctcttaacattttagagcaaccaagcataggttcagaggttttctcctgtgtgttcctttattgattaatgtttgttccttattagcgaacatttaaaaacctttactactccttgcaaaaacaaaacttgtttttttttttttgttaaaagagaattagtcatactttttaatgacattgatgtgaaaatatcgtattttaaaaatctgtgttttaaacatcttgaatctaagatattggtgccgtggctttagtctttcatcatataatttaagaaaatgtattttctttgaaaaattatttccagaaacttacgaatagcttggtcctgactgagtagttttcatcatagtgcagttaagtcctgctgtttaaggccttatggattctgatcgaaacaaacttgcttttagtaaataaatagcaccgagatatgaaagtccaagtaaatggcaaagtgaattctttctttcccagaaaaatgctctcaaaaatttgattttagtataagtaacacttttacttagatatcataaactcattatgattttactgtagatagactcagcccgaattctaaattctatgagggtagagactgtttttgtcattactgtaatcccagagtttatcctcattccttgtacaaaaaatgtttgttatatcattatatatttgtaattatgtatatttttatatagtattttgtaatataccccccattaactgtaacattctgaattgataacattgtgtgtaataacttttcttaatgtttttgtctttctctgtaggttggtattttgtatggcatctttttttatcaaaattcaagtttctccgggaactggtgggagacacaggatcccaagagggagatcatgagccttcagggtctgaaactgaagaagacacttcctcctctccacacagaatcagatccgctcgccaaaggagggcacctgctgatgaaggccacagacccctgacatagtcctgtacttgtgaaggatgaaaaggcagttgccagcttctgtcttttactgacttcgctttgaaatttactaatgactgaagaacatttgtattggattttaagtcgaattttaaaaaagatttacatgtaagccatataaaaataaagggaactgaaaccaaattggactattataaatttcatcttaaagataatcttttgtttcaccagctttctacttatacacttattccttggcttttgggcttattttcttgcactggtgcagatctggtaaacattaaaggcttgaaaaaccatattttgttagccctaaaatgtacatttttcttcccattttaacttatctgaaattgggatgcatctcattactgtcaaccaggtgatagtcatgtaacgctcctaccgtgtgcatgtgtgaatttacagcttgtcatcgtgtcatccctttaaccaacatgtgttttgttggtatcaaatgtgtcaggtttaattgacattttaaaatgtcttcaaaaagatcacactatgattcagcattgaaacgaaaagttattgtgtatgcagaaaagcatggaaacagagcagcagggcgtacatttgatattagtgaagcaaatattcgtcgctggagaaatgatcgcaattccatattttcctgcaaagcaacaacaaaatgttttacgggacctaagaaaggtaggtacccacaagtagatgaagctgtactacgtttcgtcagtgagacacgtgcaaaaggattgcctatcacacgccaagcaatgcaattgaaggcaggagaagttgccaaaaccctaggaattgatgaaacaaaattcaaagccacaagaggctggtgtgaccgattcatgcgtcgagcaggactatcattaaggcatcaaacatcgttttgtcccaagctccccactgccattaaacagaagacagtgttggagcactctttcaagaagtgctgcataaccagtactcttgacaacaccgggagagacgttctgtggaaaaatgcagacatcaatgactgtggtttgaaaagtgattcagaagagttggattcagaatatgaagttataattataacttaaccaatttatttcacacattttctttacatatgcacaagattgatgtgataaaaatctgtttaactcaaagcgctgtttcaataaatataaacattttctgtgatatgaaagcattgtgtcatagtttaatgggcagtgttttttcttagtgatacatatggtgcatcttaacaattggtagtgtcttaggttaaattaaaaatggtagcttgtaaatttatttttctttttaagatagcagttatttattggggaatttgattctgactcttacaatgttaaacttgtaatcctgtgtgaaacacatgtttttgggggggagggggtaaccaagatttcagggtagtaacttaggaatctaagaactatcttctactttaggaagagtgggattagttactccctttgtataggaggactttatgctcaaggaatgtgttgtggagaaaaacacttcttcacaaacaattcagtgacaagacctcaaaggtaatgcgtattgaggaaaacagtagtgggtgaaaattcccgcttagctgtaaaatgactctcttgccaggtttccgtgtttgtctcaactgaactctgggctgagtgtttaccagggagaagagatgtgaattaaacaaccttcctgtttagtgttacctgctttgtacaagaatgaagtgcaaagccaacttactttattaatccaagttctttttatgtttttcttaacctttattaaggactagtcatcacaaaatatctatttaacctctattttatgatggtgtgttattatgtttgatacctcatacttcttgcttagagttttgtttaacagttcactggctctgtcccaatgtttgtgatgaacacctttttgctatattgtagctcttggagatactaaaagagaattcacagaacataactttagttttatgtgtttgctaggggaagatttcctagcagctgagagcaaggcacagtctctgtcttcatttctttattagatacaattttctatttttatgtgactctagggcataacaaaacagtgacagtttcaagcgttaattttaatgcttcctactagctaaatatcatcttaaaatgattatcagaaaaaaaaataatgcccccaaaaacttttgggggcattatttggtactgggaggatatttaaattagatttttcatagtctattgttttgaactatggattctgttttatggtggatacctaaggtttatataatagttgctggaaaacttaaagtagctggtgagcttcctgttatgtcactattaaagaatgatggctgatgtaactctgcccctgaaatctacaagggtcatgcccaaattaatacaggttaacctttgtagaggtatatatgttggcattatttattgacatttatgcttcaagcatgtcttattttatgtaattttaagaaatactctatttaacttgtgaaatatacctaaaagcatactagttagctcttagactctcacttagggagggtaaagaaacatcactgatgccaatatgaagatctataaacaaatcctttgtttagaacttttttctcttcgtgcacctcacaacacacttaccatggtacatatttcttaatgccactaagaaaggcaagatagtgaacgcagaattatttatgtggtatagtgtttgttttcctgttttagtgcttttgtagctaaaacttactggaactgcatcacaactacatttgcagtctcagtgggaggtggactagcctgtggttaattttagagcttaaaagtttataagcattaaaaacacatacatgtattagaatcttgtctaacccctcacaaaggatgatggtgatcagcatgccatcttttgaagattaattctaaaattgaggactctggtaggttgttttatttccttcccaaccagccattcatttccaattgttctgcctttgaaactttttgtgaaaattgcctgtaccaattgcattggttgcgttgctctgatttaaatgccaaaaacactaaatatttgtgtagtgctgttaaatgaggtttttgatatttccatcaaaatgaatataaaattcacttgatggattttgtagtgatgttttcacagttgaaacaaacatattgctgtgcggtggacagccacttcacagacatgcagacccatttctttagagatattaggtttaaaacccattttaattttattttgctgaaggtttggaatatataaagtaatggattcacaaaatatgatatcttaaaacatgttgaaagatttgaaagtggtgcatttttacttttaagagcagcaatctttgaaattagtcaacaatgcagtcttttttaaaagtcagttttctcaagtagtatgttgtaacgtaagatgtaactgatataactagattttgactggtaaacttaaagtgctttttatatttgaggttgactttaaaaagccattgagcagtcctcagaggttatggactctcaagcgactaatggaatagtgttctgttgtgaagtctagaactaaagcaccttgtattgtctgcttctaaagtgtcctatagtttttaacttaaagtgtaaagagtaacattttatcttatgtcaattaaagttacatttttcatttgttggtgtacatgtgctacctgttttatggggaatgtttaacacgatcctccaagttggttctatgcataaccattcaccaaatactgctgctgtgattccttgaaggaaatattctgtggtctgctatgatgcattgccatcttgctgcttgacaataggtttataaataattagaattacgtgttttaatagtacctttgtatatataacaagatgtaaaattaaagatgaggaatgtgtgtaaatgatcattcactgtttttgttttaaaactggtcagtactatgaagcttctgtggtttgtatgatgttttaactttcactttaaactgcatagaataaattaaattgaaaacaacaaaagttatgtgtctctggttgataaaggataataagtatgaagggtgccttggacatgaagggatttgaaagcagccattcttactaatggtccacacttcaccccatttttcaaatgaaaagtctagaagaattaagagaatagcaataatatttcttagtgccatgaaagtaaatgacttaggacatatatatagcattaaaggacacacagacacacacacacacatatagtgttagagctacattattacatttaccttattgttttcttcccatgctgtattcaacaccctcaaggttgttttgttaacctgtttgccacagatcatgtttcacatttttgttagtattaaccaccaggaagattgaagaaactcatcaaagccaagtaaaaagatggaggagtttctttgagaatgcaattgagaaagaaaaccatgaatttcattggctggggcaagttgtgacttctccaggagtgctcagctgccaagaatgtaggatgggaagaagtggattgtgctagggttggattttgcaaggcaggtgtgtctgaagggcagggtcattagagattgctggagattggccctggaatttgggctgcgtcatgagagaagttggatcagtaaggcactggtaaactggatgaaaggaaagggatagggaattgaagataaaatgaatgtgacgtgtatgataagtttgggatggaaattaggtgaagtagttctgagtgatgacactaaatacagccatagaaaaggggaatctgagaacagtgactcattttaagcatatgatgtgagcctcagaatggccactaatattttccacatgatggctacagttggaatggagaaggtaactatgacttgggggccatgtcagggacttggaagacttatcttaaggtctgttatgtctggtggctcttaaaaggaggagggaacttcctgaaaatggaagaggaatgttctgggggagcttcgagaatgctctttcctcatcctggcctcccaccccctgggcatctctacaagtgcattagtttatcttgtgtaagtaattcagctggattgtaagaatgatgctgtttacaaagaactttgtgggggttagaggaggaaggagggaaggacagcaaaagcttcactaagaatcttgaagaaaggagttggagttttccaagtagaggatgaggattctagataaaagaatgtgcacaggcagtgtcatgggaaggtgccttgcttggagaactatagatagttggtcattcctgaaatagagaatgcacgtgtccgggggtgggggtgggggtccactgttttgacaatagagatgtacagtctaggtcacaaaaagactttgtgtgcagtggcaaaggctttgaagttcatgtcatatgggacagagactactaaactattttaaacagagagcactgatttgcttatttaacatatgttgagtagtcgactaatcttccaggcatctgcactagttgctcgtgctaactgcaaggaggaggactggttggaggcacgatggaaacaggatgtctcttaactggtccaagcaagaaaacaaaactaatggcagactggaaaggagcaatgaccatgggaaatttgaggatatgaaaaatcaataggacttgagattagattgtgaaggagaaggagaaatgaaggatgatttcaacatttagcagttgataacatggggggatgcatacagcaagagaagtaggtttgggattgggcatagggaggtggaagataggagtccagttttgggcataccatatttgaatttcaggtgcttatatgatattacgtagacagaaataaccagttgtacaaatagtatgagggacatggattgaaaacacagactcagtgttatcactatgtgtatgcatttgaagctgtatgcaaaaataggattccccagggtaggggggtggaataagaagagacccaaggtgacactgctgtggtttgaatgtttttgttccctccaaaaattcatgtgttggaaactttatgcaatagggttgggaggtggggcctaatgggaggtgttcaggtcatgagggccctgatctcatgaatggattaatgtcactataaaaaaggctttcaggcatgggatcccttttttttattttttgagatggagtctcactctgtctcccaggctggagagcagtggcacgatcttggctcactgcaacctctgcctcccgggttcaagcgattctcctgcctcggcctcccgagtaactgggattacaggtgccctccaccatgccccgctaatttttgtatttttagtagagacagggtttcaccacattggccaggctggtctcgaactcctgacctcaggtgatccgcaggtgtgggctctcttttcttccatatgaggacacagtgttcttcctctgcggaggatatagcaaggagatgccatcttggaaccagagaccgaacctgccagcaccttgatcttggacttctcagcctccagaattgtgagaaataaatttctgtcctttataaatcacccagtctcaggtattctgttatagcagcacaaaaagaactaaggctgttaacagtgtggatatttgtccccgctaaacctcatgttgacatttgattcccagtgttggtggtggggcctagcaggaagtgtttggatcataggggaagatccctcacgaaaggcttggtgccattctctcagtagcgagtgagttcttgctgtattagttcccaagagagctagttgttaaataaagcctggcagttcctccccaacccctgcttcctcttctccatgcaatcctgcacatgcaggctccccttcaccttctgccatgaatggaagcagcctgagttcctcaccagatgtccagtcttccagccagtcaagtcaagagccaaataaacctttttttaaaaagaaagaaaaaaaaaaaaagaggctgggggcagtggctcacgcctgtaatcccagcactttgggaggccaaggtgggcagatcacgaggtcaagagatggagaccatcctggccaacgtggtgaaaccctgtctccactaaaaatacaaaaatcagctgggcgtggtggtgcacacctgtagtcccagctacttgggaggctgaggcaggagaatcacttgaacctgggaggtggaggttgcagtgagccgagattgcgccactgctctccagcctggcgacagagcgagactccgtctcaaaaaaaaaaaaaaacaagaaagaaagaaattacccagtctcaggcattcctttatagcaatacaaaacagactgagactcaggcctctaaagaacattggtatttctcaaagaggttggtaaaaatttcttaaagagactggtgaaagaagttcattaaggactctgagaaggactggtaagagaactggaatatacatgaaggatagtaaggtgctagaagcaaaataaagaaaaaacttgaagagcaagtgttcaactgacatatattgtagagtgatgttgcttggatccgactttcgaagaaattgtgccaacaggaggctattgcagtagtttatgcaaaagatgacatgagtctgcaaggctggtggtagtggggacaaattgaagagatactgatgggagtcaatttgacaggttttgataattggttagatacaggaagtgaaagacaaggattagtcaatggtgaatcactgctggacactggggtggaatgtatttgaggggacagtttgggcataatcccaggtgcgcgtaagaccagtggaaatggccaatccagatcttaggatctcagtcagaagaactgagatcccatccaaatgctataacttgacagttggaaatttatttaacctccctgtttcctggtctgctaaatgggaatgataatatctatctcataggattaatttttaaaatacccatcaagcatattaatatatagtaagaaatcagtaacttcactgtccccctcccttctccttattcatctttttaagtgtagaaaccttcttcttcttcttcttcctcttcctcttcctcctcctcctcctcttcttcttcttcatcttctccctctccttctttcttcttcttcttcttcttttttttttttttttgagacagtctcgctcttttgttcaggctggagtacggtggcataatctcagctgactgcaacctccgcctcccgggttcaagcaattctcctgcctcagcctcccaaatagctgggactacaggctgcaccaccacgcccagctaatatttgtatttttagtagagatggggttttaccatgttggccaggctggtcttgaaatcctgacctcaggtgatccacccaccttggcctcccgaagtgccgggattacaggcaggagccactgtgcctggctccatatttctatctcttgagccaactgccttctcagtcagttaaacactggttaaactcagcatctgcaaggtcaagcttatgactttctccaaacctggtgttcctccagtgtccctatccagtggcttaagtcgtcagcctgggtatcattcttgatactctctgatgtcctatatccagcacatcatcaggtcttgttgatttttcttctgaagtagctcttgaaaccatatactttcttccattttcttattactgtctgtaggccaggtaatgtagtggtcataaaattagacataaattgtggtctgtgaaattagacttctgtatgcctcttttttcatctgtaaaatgggtattaatagtagtacctatctcatagggcttttgtaaggcttaaatgagtcaatacacaaagcatctagaagtgtgcccagcatatatcggttattccctaccatgataatgctcacttgggccactgcagtagtggctgtttcaaatcactacagcccatctttagtattttctcttatcgttaccgagaatgagcttttcacaactcaaatttgtcttcttgcttagaacatgtgaataggttcccattgctcctagaaaaaaggtagaaaagcttcgacatgccggtgacatgctgcacggcttcatttgctgcctcgtcatcctcttactctacatgctcatggccacatgagtcatcgttcagttgcgcaaacatgctgtcctcactcagacatccccaccctactcactggatccttccactggccgtgcccctcactcacaaacttgccttctctctccttatcttccagtccttctttcaatttcagcacacaaatcactttctcagggaagtgttctttgaacacagccccctttccagacaaagagtttgtctggaaagacaaactgtcacagagaagtcttcctttccctcagtggcctgatcccagacaagaattgaacatttgttggtggatttttttaaattaagtgccaccattcccactatgttgaattaattaaacaatatttcaatataaagtagaacttatatcaaaataacattttagcctgcaatctttttattggaatctgagagtgtaaaatataaaagatgccttattcctgcctaatgagaatctcctgaaagtggcgattttctttaatcagcaaacacaaaagtgtatgttaatgagatacatatttttcaagccccctaattctgcatcttctgtgtccatttcactccttcatctcttctgcaaaggtcaaaggatcctgtccagtgctgctggaacagcagcttgtgaccacgaggtggcgacagttttcaagagttggcaggtgaggacgccttctattccggtctggtcaggggtgtgctcctttagaagggtgtcactggatggaaatttgtttggtaattatgtggcaccctgttttgtgtcataggcattttacctagccttctttacctaaagcggctggggcgagcatagaagctgttgatcaaactggagcacttgagagtgaatgggaggagagtggactatacatcattgggccaggacaacagatacaaaccaggattgttctggccacacaggggcatcttttttctccctctaaagccaagtcaggggacaatatttacagtctctctgacacctactgatgaaggcttgaagttggagagaaaaggagcgctcccaaatagcatttgaattttatctccctgtgtagaactccagaaagcaaatcatttcagaaaatgagtgaggagaggatgattgattcaaaggctcacatatttatttgttggagtcagagaaaccctacctttggtgagatgttttgaaaataataaagtttattttttttttttaattttgttttgagacggagtcttgttctgtgcccaggctggagtacagtggtgtgatcctggctcactgcaacctccacctcccaggttcaagtgattctcctgccccagcctccagagtagctgggactataggcatgagccaccactcctggctaatttttgtatttttagtagagatgaggtttcaccatattggccaggctggtctcgaactcctgacctcaggtgatctgcctgcctcggccttgcaaagtgctgggattacaggcgtgagccactgtgcccggcctaaaatagtaaagctttgtgttgaagtacctctcatttgcaaactcctttcgcgtatactgccttcattgaacttcacagctctgtgaggggtaaggaaggaaggaaaagtcttatccttacttcacgggtaaagaaattgaagtgcaatttcttggccatggatgtgataagtgcaaaccctgggcttctgccttgttgcttagagaaggggagatacttaaagcattcaaatcactgtatgtcattcagcacaaaggaaaatgaacgcatattcaaatgcaaacacaagatgaaaccctaatttatatgagcatacctggctggataaactaatgagagagtattggtgtagcactggctttccctcactccatacggactcaacaggtttgggctcactggggttctaaatctggattgtccagcaaggaggacttgcacagggtttggaggaaaggtgcatttaacaagagcaagtggcctgtgagcaatgtggttggattcccaggggttaatagtagaaacctgcaccccgtgtccacatagtctggaaggtggtaggtctctaatgagggtggcttgcggatactcggtatctgaatgctaagctctggctttggaaactgtagccatgttttctgtggccaccttggacccagggagtgatgctttgagcagtaaggtggaccccatagggccggatgacgagcatctcagtgacagcgctgacaacctgaagagcgcaggctgttgctaagttttctggattgtggaggacccttcaggctcttagggagagggagatatgttgccagtaatgacttacattgaatgtctcactaaccctggtaagtagactcagagtcacatttaatttgattgagaaacaaaacaaacccaaatacataacaaatcttgcactgagtgttgtcaggttaactcatactcattagtgattacatgtaaaaacaagtcctctgctcctgtccagaccaaaaaatgaaacacagaaagaagcccagggccccggcctgttttctaggctggttccttcctagcccacaccatccatccatcagtcctgccccatgctgctgcaaatgccagtcaccttgcctggtgacctctcacctttaactcaagggccacctcttccatgcagccttccctggtcccctgtatcctgtggctttccattggcacctccaggagatctctcacttgtccctccttctaggcaagtgttctcagcatgcagaatcacctgggtgcttgctaagtgcagattcttggccctttcttattgaaatccactgaatgagaatctcgggaggtctggactaagaagctgtatttttaatatgtgtccctgcaggtgattactatcctctctgtaccccttgtgctggcttgaatagtgtccttccaaaattcacatctacctggaacctgtgactgtgaccttatttggaaatggggtctttgcagatgtaatcacattaagaagaggttatactggattagggtgggccctaatccaatgactagtgtccttataagaacagggaaattcagagccccagagtggcaacaccatgtaaggacagagacattgacaaaccgtggaaggccacagactgcccacgcattgatttcagacttctggcctccagacagtgagagcataagattctgttttttgttttgtttttttgcgatggagtttcactcttgttgcctaggctggagtgcaatggcgcgatctcagctcactgcaacctccgcctcccaggttcaagcgattctcctgcctcagcctcctaagtagctgggattacaggcatgtgccaccatgtccggctaatttttttgtatttttagtagagacggggtttctccatgttggtcaggctggtcttgaactcctgacctcaggcgatctgcctgcctcagcctcccaaagtgctgggattacaggtgtgagccactgcgcctggccaagattctgttgttctaagctgccaagtgtgtggtacttcgctactgcagtcctaggtaacaaatactaccctgcacctctctcttcctatcttcttttgtcttaagttatccttatttcaccttctcctctacaggaagttagatttcttatttaaattattttcatgttgtagtggacctatgtcaattttttggggtggttcagtggacgatcgcttgaggaaacgcgtgtgtctacccacctcatgtgtcttgggaggccaagcccatctctctcagtaaaggaaaattaggctgaggtgggtggatcacaaggtcaggtgttcaagaccagcctgaccaacatggtgaaaccccatctctactaaaaatacaaaaaaaaaaaaaaaaaaaaaaaagccgggcattgtggcatgcgcctgtaatcccagctacttggaattgcttgaacccgggaggcggaagctgcagtgagccaagagtgtgccactgcactccagcctgggcgacagagtgagactttgtctcaaaaaaaaaaaaaaagacataaaattccagaccttggtttccttccctgcactgcagcgatggtgcaagcacatcaccttgtccctacagccatatgttcccacccgtgcttgagggggtagcagctcatagccccaggaggctgcctgacagagacattgctccggatctgcagtggcagttgcagtggcttgagttgcccaccccgaggggttctagggtggcgtgtgtgctgatgtggtgtgggccatgcaggaggtgagggctgtcgtgtcatcaccaggccagctccgcaccctgaccgtggtattggtcctactagtgcttcctttgactatattcctactgatcctgtgagatatccaatattctctctctctttttttttgagacagggtctcactctgttgcccagtgctggagagcagtggtgtgatctctgctcgctgcaacctctgcctcccaggcttgactgatcctcccaaacagcctcctgagtaggtgggactataagcatgcacaaccatgcccagctagtttttatatttttagtagagagggggtttcaccatgttgcccaggctgggctcaagtgatccgccagcctcagcctcccaaagtgctggtattacaggcatgaaccaccatgcctggcccaatattctttctaataaacctctttcctgcttaaatcagccccagtgagtttctgttgcctgcatctaaaaagcctgattgtcactggtaggcctttctttctttctctcttttctttctttccttttttcttttactttttttccctttctcgttcttttttctcccttcctttcttccttccttctttctcttttctttctttctttcaacaaagttgctcattcaacaaaatctgaagacagacaataatgttcgctcctcaacaccaggacctcaggaggtagtaaacgtttcatcctatccacctttcttgtgattggggttgaatacttttgttcaccttaattttaactaagtaattactattagtcattaattagtcatcattatcatttttgttgcatatttaagagttgaagcttcttgagctataccgacatgtttcccggtttctttgctctccattgtttttgttttgttttgagacagagtttcgctcttgttgcccaagctagagtgcaatgcgcaatctcggctcactgcaacctctgcctcccgggttcaagtaattctcttgcctcagcctcacaagtatctgggattacaggcacccaccaccacgcccaggtaattttttgtatttaatagagatggggtttcaccatgttggtcaggctggtcactatgttgcccagagtgacctcaagcaatcctggcctcaagcaatccatccgcctcagcctcccaaagtgctgggcttacaggcgtgagccaccgcgcccagcagattctttatagagtcaaatattctattggtatttattaaacagctcctggatttgtagtcttgattaagaaaatctctgccacccttacagtgaattcatacttgtttagattttcttgtaggattttaatctcactttcatatttaagtatctaatctattttgggtttatttttatatgatgtaagatagtgacctgggtttatattctttcacatccacatatggcagatgcctggaatgtttattttagacaggggatgattttccccttatcctagtccctgcacagatggccacctttcttctgtttcctgggccagtgtgaagacatttctagtccacctttcataaacaaggctcagggattcatgccagggcttggtacattttctttgccttctgcagtctggaggtcacatctgttcatgtgagcttatacgccaggtcctagggcctttatcagggcccaaccatagtgagccacgaggcaccagggatgcgtctacttctcactgctctgggtttgatttctatctttcttctggctcctggttacctcccattctttctttgttcagctggattatgaatactgcagtgaaaatattgccattatatccaactcctctatggtttgcagtaggagggaagacctgtctgcattactttagtctgtggtatttccggaagagttccctaatattggatatatattttgaacattggaaagcaagtgtagagcacctctgggtcctatgtgaaatgagtccctctgtacccgtcacccccatggggctctgcagttgccaccttcaggtgccgttctgtactgccaattcccattaaatgtcagatcctgttccaattgtattagccagcctcctgcctgtaatcttcagggtagttgcttttttttctttttctttcttttttttttttttgagacagtctcgctctgttgccaggctggagtgcagtggtgccatcttgcctcaccgcaatctccgcttcctgggttcaagtgattctcatgccccagccttccgagtagctgggactacaggtgtaaacacgaggcctggcagatttttgtattttagtagagatggggttttgccatgttggccaggctggtctcgaactcctgacctcaggtgatccgcccggctcggcctcccaaagtgctgggattacaggcgtgagccacctcgcccggccagcagttgctttttaaactggaacgaaagcagttggcttgagtttttaagtattgttggtaagtctatgaggcatggcttttgagtgaactttgtgcatgaaagaaattagattgagaaacctgaggatagagtcccatgaaaatgtatatagtccaggcaaaggatcttacatcatattgtatttgctgggacaataaaaaaacaccaagcattttcttccgtaggtcagaacactagaagtaccctatgctgtttttgttgtagtttccttctttttttttttttttgtttgtctgtttgttgacttattttgtctgcatttgtgaggagagtgattgccatgcggaaatttacttagtaacagataagaatcaaagaatagcttcgcattttctctttcttcccccacccaccacctcctcttttcacagatattgatagcttcacatgttgtaaggaaagagttcaattttttataaaagaataacatttcctgtgccagaaggtaggccaaggagagcctaggtaatatgtaaattgggtaaaaagtaaggtgtggctctaaagttatgctactttggaggacctcttacggaaataaatttattttcttagtcatatgaatttcatgctgttagtggtctttagagaagtacctgtttctaaaggtagtttagacacatctggaaatctttcaaatattaaaaaatatgattttaaaaagtctgtttgctttcttttttctctttattggttttaaaagttgttgtctccatataggagtttcatttttggcaatggaggactaggtaattcggaccagatctcttgttcatgataactagtaaaagctagatgcaatagataattaagttttaaaatcaagaagagcaaaagggtcataaggatttattggccaagatctgggagaagacacaaatcaggagagtgagcctcatatttaaggctccttttgtcctggggaacatttgcagatcttcaaagggcaactgaaagacagagttgcagtttaaaaaaccccttgagccagagagaaagagctgtggtctggagcctgccaggggcagaagtcttgggaagtaccctacaccttgggagtagagccctgaagagctggcccaagaaggaagggtgaagataactaaatgagtctttataaggctcatagcctctcttcaggtgattctgcaggcctagaaaatctcaaactctaaaattagaatagggcgaatccagattgctaatagtgccccctgggattacggaataagcaacaagaatcctctctggagcaagatatatcattctagtcctcaaattatttctgcaaataatttttcaaaaccaaatgtctagcacacaatttaaaaaatagcacagccctacttctttaacataataaaatgtgtgtgtgtgtgtgtgtgtgtgcgcataacaatccaaaagccagcctcatacttaatcttcaaatgtcaaacactttagggaagattctcctaaagtcaggaacaagacaaggatgtccactatctctacaattgttgaacattgcactgacatgttagctaatgcaattaaacaggagaaaacaatttgaagcatagaattggaaaggaagagacaaactgtctttgttcacagaatttaactgtatagttggaaaacccaaaagaatcaatggaaaagtactaaaaccgtaagataataaagtagcagcatataaaataagcatacagaaatcaatagctttcatatatataaactaagcagtttgatgagaacaccctatgtataataacaaaaatttaaatatcttgacataaacttaataagatagaaaaaacaataggaaaactgtaatacattcttgaaggacttaaaaattttgaacaaattgaaaaacatactatctttttgaaggaaaaattcaacgtgataaagatgatacttcttcctaaaatagttataaatttagtgcaaccttaataaaaatctcctcagatacttttttcctggaactagacaagttgattaaaaagtttatatgaaagaataaacaagtgagaataaccaagaaatacttggaaagaacactaatgtagtgcatggctaatctggctaatcctattagaatgtactaaaacattttaaatcctctaaattaaagcagtgggatactggctcaggaaaagacttatagaccagtggatcagaatagaatatacagaaatacatgtaaggataatttagcatatgacaaagcaagcattgaagtcagagggaaacattaactttaaacaatgtttgggcagctggatagctataaagaaaaagataaagttgtaactttttcttaaaatatgctccaggataatttacaaatgtgttagagatctaagtgaaaaacaacaacaacagaatccatataagaactagaagaaaacatgtattttatttttataatccaagagtggagatttctaactatgactaaaataaatctagagataagagaagagattgataaatttgacaacactgaaaaaaaaacaacataaggaaagtcataagataattacaaattgggaaaaatttggcaacctttatcaccaaatattaacatgctttaatatagtaaggatttcctaaaaattgagacgaaaggactcccttctacacacacacaaagggcaaaagtatgaatagagagttcacagaagaacatgctaatcaccctcatgcacagtaaacaatatgcatgtcaaaactactgagatactgtctcatctgtcaaattgacaaaattccctgtttgacaatgtaaaatttttggtgaagctgtggtaaaacaggcctttcatacactgcaggcgaggacataaaatggtacaaattttgtgatgggaaattggcaaatcagtatatgcaaattacatatgcacgtgccttttgatccaccaatcacgcttccaggattcgatctcaactatccagtggcgatatacgcagacatgtgccactatactctatggccttatctgttatagcaaaaggctgcaaaacaacccaaaggtttttcagcagagaatgggttgaataaaaactacagtatatctagaaagtgaaacaaggagacactttccattttcagatatgatggagtggttagtagaaaactgatgcttccagtgagaacaacagaaaaagagagatccaattgaaagggatctgtttgaagtcttcagagagtcacagagacaccccacagatgaagggtcaaaatactagagagaagggaatcccactgaagtgagcccaacattctgaatgttgattttctcccttggcatttgctaattcttggcatgaagaaagaggttgagaggcttggtagagacttggaaggggaggaaaagcagcagagttctcacggtcttacaggtctgaggtgataaaacttggagtgtggagtttccaagtcggctgggttcaagaagtcttggttccagagagaagggaggtgcagaggagtgagcctgacatctgacggtttctctcggaagtgcgtagtgttagttatgtagagtgacagtcaagccgggaaaagcaactggaaagcaaggtgggattttagcagtcttgtgttgtaacggagataaaaactagagtttgggaactgacaaggaagtagcgttttattttatttttttgagactgagtctcgcactgtcgcccgggctggagtgcagtggtgcgatctcggctcactgcaacctccgcctcccagcttcacgcgattcaaggaagtagcatttagcaaatgcgccaggctttcaggtgagaccattggaaagggagtgcatgagggctgatcaagccttactgcaacgcagacttcgtcttcttagtccctgactggattgagataaactgaccttactccagcagcctgtcagaccacggggtaacccttctccagaggaaagtaactccatccagagcctctagaccctgtgatcagcattcaattcaaaattagtaggattcaagaaagaggatcaagagaaaaaacatactcacatgtgtcctagattgttgtagctatcagatgcagactttaattgtaattatcgtgatcaagaaaataaattacaaaatgaagaattttactagaaaactggaatgtatatttttctagagagaactgtaaagcttttttgagagaatttaataagtcaaaatttcaatataacaacagcatttgtggcctcagcttgtcttctttttaacttacagctgcccatccaccaccttcttctggaattctagcacactgtaggttaggcagaatcttccttttcacattgaggccatctgcatactcactcccactctttcccagacccatttcctggcagtcaccttccagttcagtttcctcctcaccttcagctacaggtgctccttcttctctctcttgtccagcttcaacatcctgactctcagctggtggttcctcttgttgagattgttaatcatggcctctgggcagccacagatccttctggcctggaggaatcttgaccacctcctcttctggatcctgattttacccatgcactcatattttacgctgcaggtagaaaatcatgaactaggggctgggcacagtggctcatgcctgtaatcccagcactttgggaggccaaggctgtcagatcacttgaggtcaggagctcaacttgaggtcaggagatcacttgaggtcaggagaccagcctggccaacatggcgaaaccccatctctactaaaaatacaaaaattagctgggcacggtggcaggtgccggtaatcccagctactcaggaggctgaggcaggagaatcgcttgaacccgggaggcggaggttgtagtgagccgagatcatgccattgcattccagcctgggcgacaagagtgaaactgtgtctcaaaagaaaaagaaaagaaaattatgaattaaaacccccccttgctacctaaacatgacctctgcagtgtcaactgcaccagctaatctggaatctatattttttaaaaagcaagtagaaatactggcattgaagaaaaaaatacagtaagaaaaaggagaactccacagatgtggtttaacagcaatttggtcacagccaaagaaaggactggtgagctggagataggtcagtagaaaatatcttgactgaagtacagaaagaaaaaaggatggaaaacaaaaaagtgtataggagacatatgagacatggtctatcatatgaaactttctaacctgtgtaattggagttcaaggagggaggaagaaaagaatgtggcagaagcaatattagtagagataataaacaagaattttccaaaaggggtaaaaaatattgagtcatagaatcaaaaattactaagaacctaaagcaaaataaaggcaacaaaaataacgccttggcatactacaatcaaattaataaaaattaaagacaagaaaatcataaaagcaagtagagaaaaaagatacattacttcaaggaagcaatgataagattaatagctaacttctcaatggaagtgatgaaaactaaatgatggaatgacacctttaaaaggctgaagagagacaacagcaagcctagaattctatatttggtgaaaatatccttccaaaataaaagcaaaagaaagatatttccagaaaaacaaaaactaatactaatatgagtgtatgtcaccaataaacttctaatagaagaaatgttaaatggagttatttgtgttttgcatcacaattgttgtagggcttatacaaatttatacatgcattaaaattcatagaactgtatgccaaaaagtcagtacttctttttttaaagaggtgctttaggcacaaggaatgtggtcccagatggaaatccagagatgtaggaaggaataaagagcaatagaaaaagcaaatatatcagtaaatataagtgactattgactatccaacaataataatatcttttgtggtttaaaattaatgttgaattgaaatatacgacatccataaaacgaaagacagcatggggcaaatagagaaaactgtgctgaggaaagaacattatccaacaataacgttggatattgtggtttaaaattaacgttgaattgaaatatatgacagccataaaacaaaagacagcatgaggcaaatagagaaaagtaacctaaggaatgaacatattctagggaagtgtaagtactaatttgtatttaacagtagtaagtcaaggattcatattataatctctaacataaacactaaaatatagtaaaatactctataattgaaaagctaatagagggagagactattaatacttaattcaaaagaaggcaagaagggaaggaaaaacataaaatgagctaaatatataataaataataggtataaatgagcccaaatatatcagtcattacttgatattttacttggggtagtttatatatttacattactgagataaatacatgaaatacccccatataaatatataaaataccccaagtaaaatatcaagattgtcaaactagtttgaagaacaaagcataactatatgctacatttttggatttattccaagaataaagcttgattaatactttaaaaactaatcagtttagctcactacattaatggaatgggcaaggaggaaacatttctaaactctttttatgaagctagcataatgtgtcaaggaaattacaaaaaagggcattcctgagttagtctttctcatggacatggatgcaaaaattctagacaaaatattggcaaattgaacccagtggtatataaaaaggataatatgatacagctaacttgggtttaaataagaatgcaaggttggcttaatatttgaaaatcaatcaatgtaattccccacattaaggaaaaaaggggaaaaaatcatatgatcatctcagatacagaagatatatttgctaaaaattgacacctattttttatttagaaactttaagcaaaaaaagaaactttcagcaaaccaggaataaaatagatttttcaaaatctgataaagtactacaaaaattattcagaaaacactatacataatggtgaaatactgaaagttttaccttgaatatggaaacaactaaagaatgtcaactcttgccatttctattctaggttgtactggagtacttttcaaaaagaaaaaagttgacagttaaataaaaactaataaaatagttacttatggggagggtagaagggacatgaatgagagtgaacctctgtgaaaatagcttcttataaaacccaatatatatttattataattaaaatacaaaaattaagttttaaagaagtgaaaataatcaataaaaatggtaaatgaatggaaacaaatgaacctgtctatcaaattggtgcaagagtcataaagaggaaaatattccaagtgaatttaggatatggtaatttgactgtacatctcagataatatattctaatgatgagaataactactaaaaaatctcaaatggcattcagtatctaattgttagtagtaatattgtcattgttgcttggaaactgttatatgaatgttcaaactgttactttgagactgttatatgacaaataaataattatattactcctaaaaggaatcaaggttttcagtgtacaagaaatgagatcaaaggataaaataaaagaaaataagtaaaactttatttttttatttaagttaaaaatataactatgaatttgtggcttttcccttttattaaataacaacaccaccatcttatttcctagccttgtcaaatataggatctagatgcaataattactcatagcactggtcacttctaatatccagattgtggtctctcagtactgtttccaacgtaaaggaaatgagtttttgggaaactgaatgatgctaggtctggggcaggaaaacactagttggatctggggcacactattgcaccagaaagtgaggaagcaatcaaagactggtgtgattacattaaaagaccataggaattaagtagaagaagctcccactggccaaaaaatgggagaatttgagttcacaaagagaataatgactgcgattgatagaaatatatcaaatatctaaaaatcagtaagttcagaacaggacaagggtgtcactctttccatttccacattgtaccatagaacattctggctaggacagctaggcaaaaaaaaaaaaaaaaaaaaaaaaaagaagattcacattggtaagtaagaagtaaaattatttatattcacaaatgacatgatcttgtatattaaaaagatcaaagactctaccaaaaaacaatgagaactaacacacaagttcaacagatcaatataaaaaaatcaattgtatttctatacagtagtaataaatagtctgaaaatgaaattaagaaaaccattctctttacatgagtgtcaaaatgaataaaatacttaggaataaatttattttattcctaaggaataaaaggaagtacaaaactcaaaacttgtacactgaaaactacaaaacagtattgaaaaacattaaagaagatttaaataaatggaaaggcactccatattaacagattgaaagacttaatattgttgggatggcaatattccagttcatctacagattcaacacaatttctatcaaaattcatatgggcatggaaggaaaccagaatggtccaaataatctttaaaaagaacaaaactggttactcatatttcctgatttcaaaacttattacaaagctatagaaatcaagactgttttttactgtcataaggatagacatattgaccaatgaaatataattgagaatccaaaaataaattcatatgcttatggtcaattgatttttgacaaagcagccgagaccatttcatgggaaaagaatagtcttcaacaaatgctggaagaactgaataactgaatatccacatgcaaaaaaatcaatttgtaccctgaaatcctaccatacacaataaagtgaatcatgtatctacatataaaagctaaaatcattaaactcagaagaaaacacagtagtaactctttatgatcttgaattaggcaatggtttcttagttatggcaacaaaagcacaagggataaaagaaaagattgataagttggacttcatcaacattaaaaaaattttgtgcttcaaagaatgccatcaagaaagtgaaaaacaacacacagagaatattctcaaatcatgtatctgaaaagggactcatatccagactatctaaagaattcttacaataataaaagacacataagccaattaaaaaatgggcaaacgatttgaatagatatttttccaaaggagataatgaatgaataatgagcacatgaaaagatgctcagcatcactggtcattagagaactacagctaaaaaccccaaggaaatactactgcacacccgctggaatggctgtcataaaaaaagacagccagtaacaagtgttagtgaggatatggagaaaactggaacttcatacattgccagtgtgaatgtaaaaggtgcagtccctttggaaacgagtttggcagttcctcaaaatcttaaacataaagttaccatataacctagcaattccactcctaggaatctacccaagagaaatgaaaacatgtccatacaaaaatttgtacatgaatgttcataacagcattactcacaatagccaaaaagtggatacaatccaatgtctatcaactgatgaataaacaaactgtaccatatccatgcaataggatattactcagcaataaaagaactgaattacttacatatgctacaatatgggtgagtcccaaaaacataagtgtcacaaaagtccacatattgtgatcatttatatgaaatatcagaaaaggtaaatcttttttatctttttttttgctagacttttaaaagcaaaaatcttggttttactcatcaattctactttttgtttgtttttaaatcccttacttttgtttttatctctactagtatttctactttgttttggttaattttgttttttcttacttttgagtgaaaatgaattaatttggtttagtttcaaatttctaaatttccagttgctttttggagggttctgtcttaatttaaaatatgaatatgaagacagataccttcttgagagacctgaaaatgttatttccaaattccaaatatgacactgtattatgttgttctattgaaagaatcaatctgagataattcacattaaaatatgaagttggatctgcaggagagaagattgtagttagtcttgtaaatttaaaagttgtctttccatgaaaacattaagaaaagcagatggccatgttttgtttctattatccctgcttgagcctaggattatccaaattccaatttcccaaaactgctaatacaaaaaaggtatgcgccttcaaggaacgtctttcctttaaaaacctcatcccactcatccaaaatcttattaaagtcatttgacagccttcattcttttttgaccaatcagttccccaagctcaaccaactttgttcagaaaccttttacatttcttattatgtgggaaaatgattcattttaattgaagagagcttgttcggaattttcaaaatgaaatttgagctcagacaaagaaagcctcagacagaaagggtaatttttcatcaactactgaaaccaggggacataaaacgaatgtctgtctgtgcccttagcattcatggtttctgccatggaactgaatgcccattcttcattgttgatctgtgactcagcccttgtgcatgaatacttggatagaacagagacacacagcagggcaattcttccctagtttaaattgtttatggtgccttttgtacctataattcacaatttaaacattcctcttaagtgcatttgtttatatgctactcaggcttaacaatgggcttttgagaagctcttatgtactattacactacgaaatgtctccttaccatagaaaagaaggtggtgggggagtggggatgggaatatgaccttctgccctgaggacttgtgcaaagaacgcagactgactgtgggaatctggggaaagaaatgattcctccaacaactgaaggaggagtgtgaaacaggtgctccaatattgaggctgtacaggaggaaagagcctgggctcaggaatgatacagagcacgaggtgcttcatgaatgtcgtggaagagttaggccggtgaagcacaggtaaatgtgtgccaggcaggagaaacagcagaaacgatttaggaaggtatggcaggtcttgtgcgtgtagaggggtttcatgcaagactgaagcaggtgtggagaggacgagatgcaggagatgaggtccactcaaggagggtcttgtaggccacaccaagagagggcattggggtgcccttagggggtggcaggatcatatcagaatcgggggattgtctccctgaagcagggtggagatcagatgggaaagggcagggtgtgtggaatcagggaggtcagttaggaggcctttgcagttgcccagcttgcaatgatggcacctggcagtaaggaaacagccatgggaatagtgaaagtgagcagatcctgtgatgttagaggctcacttctattactcttggccgttggttggatatggggcctgaaggaatggaatgattttcatttctgccttcacaagctgggtggatggtagtgccttttgctaggccagaccacacaagcagaggttgtctgcaaaatgcaggcagagtggttatgcatgctggaaggtatgggaaaagtggacaaggctggagacagatatataaaacaagacaagctgaccgaaagcatgctcagcagtctttggctctcacagagtatggagaccataactggcatggcctgcgtggctgtaggatttttttccaggctcatgagagaggtgggtgctgactgatgccctggcttgggcagatgtccctcagatcagagcaggacatacttagatgccaaagtgtcctatccaacaatagtcaagagatgtccaccaatgtaggaatagataaacaaaacatggtataaacatatcatggaatattattcagtcttaaaaaggaaggaaattctgacccatgctagaacatgaagggaccttgaggacattatgctatgatagataagctagtcacgaaaagacatatactgtatgacttcaaaattcataaagacagaaggtggaatgatggttgccaagggctggggcaggggagagtggggagcttctaacaggttcagagtttcagctttgcaaggtgaaagtgttctggaggtctgtggcataacaacgtgaatacagttaacactactgaactgaacactttaaaattttcaccacaattaaaaatttaaaaaattttggctgggcatggtggctcaagcctataatcccagcactttgggaggccaaggcaggtggatcacttgaggtcaggagttcaagactagcctagccaagatggtgaaaccccgtctctactacaaatacaaaaattagcccggcatagtggtaggtgcctgtaatcccagctactcaggaggctgaggcgaagaatcgcttgaacatgggtggcagaggttgcagtgagccgagatcgcaccactgcactccagcctgagcaaacaagagcgaaacgtcatctaaaaaaaaatttttttttaaagaaagacatgctataagcaataaagaagtttagcttgacttacaactactcaggaggctgaggcaagaggatcttttgaacctgggagtctgaggctgcagtgagctatgattgtgccactgcactccagtctggtgacagagggagaccaatctttaaaatgaatgaatgggccgggtgcggtggctcatgcctgtaatcccagcactttgggaggctgcggcaggtggatcaactgaggttaggagtttgggaccagcctggccaacagggtgaaaccctgtctttactaaaaatacaaaaattagctgggcatggtggcattcacctgtagtcccagctactcaggaggctgaggcaggagaatcacttgaacccgggaggcggaggttgcagtgagcagagattgcaccactgcactctagcctgggagacagagcaagagtccatctcagaaaaagtaaataaataaataaaatgaatgaataaataaaatttaaaaaaaattaaaagtgtcctatgaatgcctctgagtggatagtctgcttccctctcaccttgtttgccttcactgtggtcctgaggctggctcagcctgatgtctgctctcctgtcatctgttgaccgactttacccgtgacctgggaattcacacctgcctcctgcagaggacaggatgttttctgtggccactgcagcactgactcaaatagggagagcatctgggtttgctctccccacttgtagttggtgaatgacatggaggactgattcctcttgttccctgcagaaatctatcttgtgctatttagcaaaagccacctgccaatgtatttacacaccaccacattttattaagggctgagaaaggctcaatgatgcattcagccttttataaatatttcttaagatgagcaaatcggtacaagaggaacataggagggaaacatcaggccagagctgcgatgggtccctccaatgcacagcgtaaggtcttgtgcaagtaggagaagtgagccttgcctttgaccctgagtgtcctagggatcatagcaatgagaaaatcacacatggaaattaaatctaccatgctcataagactcattcaataaatgcttgttagcagatatcctattccaggcactttttgtctgtgagaacacagcagtggataagacaggcaagttttcttctctcgtgagatcacattttaggtggaagaaggaagagagaaaaaggcaagcgatgagcattctgagagactctggagaccactgtgtgctgcgaggtggctggggggtactttggactgggaagtgtaggtggctgggctttgcgtgacgataagggggctcctgagtggccgggaggggagccgcagggcagcagggtagctggtgcaaaggtcttgaggggaatgcctttggcttatctgagagaccaagaagatgcccccgtggctggaatgtgggaggcgaggttgagctgaggtcagatgtcagcgaggcaaagggcaaagaggaggactggctggcattgagcaggtgaggcgtgggatgtggttcgtgtttgtaaaggctctcctggctgctgtgtgggacttgcattgtatccggcaagtggggaaacaaggagtccaggtgaaaggccttggctactgtcgaggacagagacgccagcagtttggagcaggctggtggactaggtaagctcccttagggagaacagaaggggccacagaagcaagccttgggccctgcagcaaccaacacagccattcaggagagcttggctttaatttctcaaggggatccttagaaagagacactggtgtgtagctgaatacttaaaagcatcactccctcctcccttcttcctgctgcaccttcctcggcttctcccatgctcgtggggtgcagacctgacatatcttttgtggcgtggcaaccaaggagtcctcagccgtcaccacgactgatgcaaaacccaaggagggtcaaaacaggaaatgacatcaaattcattagaaggaggtaggatgggatcattctgttgaagaggagacacagagcactagtgactaaatataaacctagtgtgaaggccaggatttgtcaccgaggctgatcatattctaatttggtgggcggataatcaatgaaacagatgcacctgcacagttggaaatgaaggatgaaaatgcacatgataggccgggagcggtagctcacgtctgtaatcccagcactttgggaggccgaggcaggtggatcatttgaggtcaggagttcgagaccagcctggccaacatggtgaaaccgcgtctctactaaaaatacaaaaattagccaggtgtagtggagcgcacctgtcatcccagctacttgggaggctgagacaggagaatcgcttgagcctggtaggtggaggttgtgatgagccgagactgcaccactgcactccagcctgggcgatagagtgagactccgtttcaaaaaaaaaaagaaaatgcacatgattcactaccttacaccagaacccacagacacaaaaacactctcagttagcaaattacagttggagcccagcccatcctgacttgtacacataattctctctatcccatcatttgttctctcccttcactgtacatcaagtaactgacatatgtgatcagatctattgtataacactattattatttttttaactaaatggctagtgatatagacaataaaagaaaatgaggtagagaaaaaccttcttatgaaagaaccccttaggccgggcatggtggctcatgcctgtaatcctagcactttgggaggccgagatgggcagatcacctgagatcaggagtttgagaccagcccggccaacatggtgaaaccccgtctctactaaaaatccaaaaattagccaggcatgatggtgtgctcttgtaatcccatcttctcaggaggctgaggcagcagaatcactcgaacccgggaggcagaggtttcagtgagccgagatcgcaccactgcactccagcctgggtgacagagcaagactctgtcttggaaaaaaaaaaaaagaatgcattagtggtgtgcttgttccacttttatttttgtttcccatttagttttttactttcattgtttgacaaacaatagcaatgacaacaacagactcctctgcatacttatttgattagagaattccaatatgtttcaattatcattgtgaaatcaaggagactcatgactttttgtacacagctgttacatgtacggcaatcagtttttaaggtgggataaatttctctaaaataaatgatcctagatagctttccttcaagtcaagtgtcttgctgtttaaatccatttcttgtttaaagtaataatataaaaaagttcatcactttatcaacagaacagtgaaactatttcttataacaggagcagggctgtcatatcatgtcagagagtaagaggaattctatgagatttaagaggccaagacagtgtggtccaggtgcaaactcatgggtggattggcttgatcaggataaagcttagcatagctagagggatggatgagttgtaaatctttgcagaaacctctgtgaacgttcatcacacttcttcgatgcagtcaccttgacctgccatccacctggatgctttaggtagtaatcttcctggaatctggaggtttaaccatgtggcttcccaaagatgcctgcagctacctgaccctgggaggtttgaagacagtgctcactcaggccctgccgacaggaaggctttcccggccaaatggccagagactttgggagctttcaaaagaaactcttagttgccccaactctgctctcctccaggaaaaaattactgtagaagccaaagataggcagtttttgcctttccttttccacgtgtttggtatgtaataagtcattctcctgtgaggtttaattactttgcatcctatagcaaggctaggccatataggatattatcatatttccccccttgatttcctgaaagctcagtattataccaaagatgtgtttggaagattaccgagtagttattttatctgtgcttattttaactcaatatctacttaatatatctcacggcttttgcaaaagtgaaatgcgtgagtagcttaagctcgcccacgtttccaaccctgcttgatcaactgtacttgattctgcttggtcacccaacaattaacacacacttcatgctcgatctatgaaaacgttgacttaacattattttagtcagtcagcagatcccaagaggaaattcttagatttggaaaatttttgtgtgcttcttttgttttcaatttcagaatggtggcaatatatttgttaaacatttatatgaagctgactatgtgccagaccctgttctcaatgctttgtaaagtttaatttgtaattttcagtcttctaacaagtctgtgatacagcgactatgattatgcccattttattggtgaggagatcaagatctgcagagagtgaagtagctcattgaagagccagagatgagatttaaacccaggttctattactgaggccaaactcttctagatgagattgaactgctgttgttgttgttttgacttttcatttggaaataattccaaattttcagaaaagctttgagactaacaatagcacacaccctttactgagatccacttactgttaacacagataaaattgcttttctaaaacacgcatgcctatatagtcacctttaccctagaatacttgagtgcatctttgctaagaataggaatattctcttacagaaccaccgagtatttatccacttgagtaaatttaacattgatttaatttattcaatggtagtctgtatttccatgatgacagttgacccaataatgccctttcttatttcctctgggatgggatccagtctagggcccgacatttggatctagttgtcatgtctgtctggcctcctttaatcagaaacattcccacagccttcctttatctttcataacaatgacaggcagcagaataagtttccctgtgccttttaaagacagaacaaatgttcttcattgtgtttgtctgatgtttcctcacgatgaggcgagaaaatgaaatactgcgtaagtgatcctgcatccgtctcaaaaaaggtctcatttctggagacactgatgtccttctcacctcattggcggtgttgattttgatcattcctcccctccagggcgttgactgatttccccatggtgtaaattactagttttcctttgcatctaataagcagcctgtggggagcctgaaatatgtttcttgccaggtggaggcacggtcataaggagcagtgtgtgtgtgtgaggatggagagaagcccttcccttctaggggaacgtgaggagagtggagggtgcacttcctccacctgcagctggaaagtctgtgcgcctttcagtgatgaagcttacagatggatgttgcagggctttgggtagggcctggaccaggctccaggtagagtatttcgggcttggatgttttcaggcaccaataagtcaagcttgcattgatgatattacaaagtggcagaggtgcctcctgaatgaaaaagaaatggaatcctaaccctgacttctgtctttgagggtcaaacatataaaaacatgtctgatgccggatttctgggaagggcattggtttctggaggggagattgataatggcagagatggaagtctgggccagtttcacaccagaggcagggggaagttgcaaggaaagattgatttagggtgtgaaattgccaacagatgaagttgttccacctggcaccctggtggtggatgtatatggaagaaaacttgctatgagccgcagttctggagcccctccctttctactgtggaacatattggctcagcacacggaggagcagagcccatgcttctttatacattcagagagcatcagagctctcacatgtggctaatcacatgtaatcaaagatagtagctaaaggctgggcgcagtgactcatgcctgtaatcccagcactttgggaggctgaggtgggcggatcacttgaggtcagaagtttgagaccagcctggccaacatagtgaaaccctgtctctaccaaaaatatttttttaaaaattagctgggtgtggtggtgtgcacctgtagtcccagctacttgggaagctgaggcaagagaatcgcttgaaccctggaggcagaggttgcagtgagccaagatcgtgccactgtactccagtctgggcgacagagtgagactccatctcaggaaaaaaaaaaaaaaaaaagatagtagctaaaaaagagaggatgaggaataattttgaggaataatttaggtagaaaagatggtatggagagaaaatgtaaaacccagatggacccataagttactagttactgatattgggcatcaaatttgtctctgacctttacagtaaaggaaaacatgatcagttaattgcaaaaatcttgtttccatgagaaaaagcatatcaattactcaggacaaatgaaatatcccctgatgcttaaatatgaatacgtttgcctataatttgctcattgatcataaaacttttcttttgtttcgccttctgtccattttctctataattgttgttttgcttgctggtgcaatggttgaaaggcctatagatgctgtaagtgctgaagatctgaggatgaggatctgaggatgaggatgggatgtactgaaagtgttgggtcatgttgacagagagcatggggtgattaacgtcacagtcatcccaaaccatggattctaaatctagggacaggttttggcctggttacagcaactttgcaaaggagtatattgcagctgagatcacccggggaactatgaaacaagcaataaaacaaaagatcttcaaggaacactgagaaggggacttgtagggatctgctgtgcagcgcaaatccaacctcaggagcttacagcagagaaatcacatagacattcaacgagaacaaccaaagttactaaagtaattgtggaaaaaggttatataaaggggaaacaatacaacagtaactcatgggcactacatcctgccttttgaaggaattttatttttagttattgttaaggatcctgcaatgttctttttcctttaaagggctcctccaagccaggcgtggtggctcacgcctgtaatgccagcactttgggaggccgaggcaggcggatcacttgaggtcaggagttcaagaccagcctggccaacatggtgaaaccccgtctctactaaaaatacaaaaatcagggggacgtggtggcaggagcctgtaatccaagctactcgggaggctaaagcagtgaggaggcacaagttgcggtgagccgagatggcgctgagaggtgacagcctgctggcagccctcacagccctcgctcactctcagcacctcctcggccttggcgcccacttcggcggcactcgaggagcccttcagcccaccgctgcactgtgggagccccttcctgggctagccgaggcgggagccggctcccttagcttgcagggaggtgtggagggagaggggcgggcgggaaccggggctgcgcgcggtgcttgcgggccagcgtgagttccgggtgggtgtgggctcggtgggccccgcactcggagcggcctgccagccccgggcaatgaggggctcagcacccgggccagcggctgcggagggtgtgctgggtcccccagcagtgctggcccaccggcgctgttctcgatttctcgccgggccttagctgcctccctgcggggcagggctcgggacctgcagcctgccatgcctgagcctctcccccacgcccgtgagctcctgtgcggccgagcctccccgacgagcggcgcccctgctccacggcgcccagtcccatcgaccacccaagggctgaggagtgcgcgcacaccgcacgggactggcaggtagctccacctgcggccccgtgcgggatccactgggtgacgccagctgggctcctgagtctgggcgggacttggagaacctttatgtctagctaagggattgtaaatacaccaatcggcactctgtatctagctactcttgtggggacttggagaacctttgtgtccacactctgtatctagctaatctagtggggaggtggagaacctttgtgtctagctcagggattgtaaacgcaccaatcagcgccctgtcaaaacagaccactcggctctctgtaaaatggaccaatcagcaggatgtgggtgtggccagataagagaataaaagcaggctgcctgcaccagcagtggtaacccgctcgggtacttttctgtacgggtgtctttccacgctgtggaagctttgttcttttgctttttgcagtgaagtttgctactgctcagtctttgggtccacactgcctttatgagctataacactcactgtgaaggtctgcagcttcactcctgaaaccagcaagaccacgaacctactgggaggaacgagcaactccagacgggcagccttaagagctgtaacactcactgcgaaggtccacagcttcactcatgcgccagtgagaccacaaaccccaccagagggaagaagctctgaacacatccgaacatcagaaggaacaaattccagacacgctgcctttaagaactgtaacactcaccgcgaggatccgcggcttcatttttgaagtcagtgagaccaagaacccaccaattccggacacagctccactgcagtccagtcttgagtgtctgaggcagactccgtttaaaaaaaaaaaaaaaggatcctccaatgtgggatgggggtggaggagcttggaggtggattcattcctttgggttcagttagccagtcaacaaacatgaattgaactctttgtgttagttaggtagtgagatgggaaagatgaactcatggtccaagatgccctgtgtctgaaatatacaagaggctagggagatgtgcagcaaggaagtaatcgtactgctacgtggttgtggagcgcttaagaattattttgaatgcttattttcacaacagcgaatcaggtctgcactagcattcctatttcccaggcacgttagagatgaaatcggttgtaaaaaccaattgtcctccacctttcatttcccatcagaccacaagggggcgccgtgcgaggcgaacacagccttagatctgcaaaatgctggtcgctgcgtgaggggcttcaaaacatcctaggtggtgcccaaagaccttgttgcctgagctgaataggtgctagctatttgcactgtcagcgctctaaaggatttctgggggccccctttcaacgggaagccacctggtacgtgtaaacacccacaagttcactcccctttgcaaggggcagaggacctagtaacttttctctagagcgctctcctctgcatacaggtccctacatgtccccttctcagtgctctttgcagatcttttgttttcttgcttgttgatttttcttttgcaaacaggattgggggacccattatttatccaaaaccttcttttgtcaaatcgtaggtcctttccagtgtagactggatgtctagacagagaggtagaaataattgcccaagggcaaggacagccttcactaagttgtccatttacatctttacatcattctaaaaatacacccacaccagccctttgtcttgatattttaacattgggcaaggctgaaataagttacttctctgaccactgtttaaaatgtctcattcacaaccattgttcttggagacttcaacttctttaataggaatttaagtcacaaagggcccagatggttctgaaaaaaaaacccgttaggctgcctgggtcataaagaaggctcataaactgcgcttggatgatgactgggtgaggggctgtgtgggggatagacaatgtctggtgtctggtggtctcctgactgccaggcaggccagagaaaattaggggtatgttttcatttaacatcattccctgctgactcttgtctctctggaaaattgacagttaggagacaaagtaaggtgccctttttgttaactcagttttcttaattatagttgttgggagatgacttaaatcatgctgtgaggtatggtggtggttcctgcccctcaatgccccctcccaggctgcagaggaatttgctttagagattggtaatagttgagtctgagatgaaggtcagtcagtgtgctgaagcttttcagttgcccttgtagaggtttctccccctgcaggctggcctctactcattaaaaccttttctttctttctttgtttctttccttccttctttcttttcctttttctttctttctttctttcttttctttctctctttttttctttcttttcttctttccttcgttcgttcgttctttttttttttttttttttttctgagtctcactctgttgcccaggctggagtgcagtggtgcgatcttggctcactgcaaccttcgtctcccaggttcaagcgatcctcctgcctcagcctcctgagtagctgggactacaagctcccgccaccatgcctggctaatttttgtatttttagtagagacagatttcactatgttagccaggctggtcttgaactcctgacctcatgatccccccgccttggcctcccaaagtgctgggattataggcgtgagccaccgtgcctggcctagaactatttcaaggctgtttttctcttttcttttccttcttttttcccaaccataaaataagcatgtgcctacacatccacgccctaggaggaagtaaagtgggcttaacttagcctcctccagataagagtctggaggttcttgcccaatgttgctcctccctcatgcgctttgctcagtgccagggagggggagtgcagtaagtgtggattgcaccccaggctggttccatggagatggaaatagcgttggcacatcctagctcatgaatggatccacatccatccagatgcccagccaagaagcccttccccgggctcctcatcatcatgcaccaggtgctgttcatcacttttcctacggacttgccctcccacgtccctggaacctatctgcatctccccatctccactcctccattctaatccaacgtatcttcactgcttctcctagaactgattcaatgccctcctaactgaactgccaggatccacatggcccctcttcaccactctccacactgcagccagggagctattttcagagcaaaaatatgatggtgtcatatagctgtttaaaattctttaattaggccaggtgcagtggctcacacttataagcccaacattttgggaggctgagggtggaggatctctcaaagctaggagtttgagacaagcctgggcaacacagatatctgtctctccaaaaaaaaaaaaaaaaaaaaaaaaaattagctgggcatagtgtcatacacctgtaatcctagctacttgggaggctgagatgggaggattgcttgagcccaggagttcaggctgctgtgaactagggtcttgccattgcacttcagcctgggcaatagagcaagacttgtctcttaaagaataaaaatagggccaggcgtgctggctcacgcctgtaatcccagcactttgggaggctgagatggcggatcacaaggtcaggagttcaagaccagcctggccaacatggtgaaaccccatctctactaaaaacagaaaaattagccgggcgtggtggtgtaggcctgtggtcgcagctactcgggaggctgaggcaggagaatcacttgagcctgggaggtggaggttgcagtgagccaagatcacaccactgcactccagcctgggtgacagagcttttgtctcaaaataaataaataaataaataaataaataaataatctttcaatcatttaatgtggccttgaaggccttgcatggccaggtacctgccacttcttcagcctcatttctcaccattctcccacttctctgctgtgcgccaggcacactggactcttcctggtcctagaacacagcaggatcctggggttctcagggcctttgtccttactcctacttctgcttggaatgtcctttcccagctttgcttagataaagtccattcactcatcagatctcacatcaaacatcttttccagaagaaagccatccctgctccccacactactttaggatgcgccaatattccctcttatggagctatgtatcttgacttcatagtgtttcatagagttgcgcttttcttttcttttttgacaaaaccaacatttttttttcactcaccagattggaagtttcataaagcaagggatgtattaaatttttattgcttcccttgtaccctcagtgccaggtacataataggtgttcaataaatatttgcagaacaaatgaatgattgaagttgtattgatagtagtgcaaacttggaggagaggctaataaagcctgtccaaaatataccacccaccaggtgtgtataacttactctctgcctttcctgacttgtattttgaatgtcagagatgaaggtgaataacaatgagtaaataggatgaaagaacagaaaaatcaaagatactcaggaatgactgagtggcccagagaggctgttcaggagaattcatgaaaggatatagtaggaaatgagagtgaaagagccatttggggttagatcatgatgggccttaaaagccacatcatatactttaaagtgttagactttagagaaagaataatagcacataagtgatgctgtactagaaacaagctgtggtctcactatatttactgtaaagatgatatgtcatgatgctgtatgatttactgtgttatataacccgttatgaagaccctggtgagaaatctctctgaggtcccagtatgggaaacagtgggcttgatttcattttatggatacttataaatcatataacggatttcattttccttccttccttccttctttctttctttttctttttcttttttgagatggagccttgcttagtcgcccaggctggagtgcagtggcgtgatcttggcttactacaacctccgcctcccaggttcaagcaattctcctgcctcagcctcccgagagtagctgggattacaggctcccaccaccacgcccagctaatttttgtattttttagtagagatggggtttcaccatgttggccagtctggtcgtgaactcctgacctcaggtgatctgcccaccttggcctcccaaagtgttgggattacaggcgtgagccaccgcacccggccggatctcattttctttatctcatgggctgtccagaaaactcaaggccaaagttcacaggcctttgcaacatgcattttgtgtatgaactatgttaacagctacgtcttattttttttacctttattttctttttattcagttgtcttcttctaaaacgaaaatattgtatgcaccttagtctttgtggggagaaagagactagttatatgaattaataaataatgtgagtattttactattaggaaaattaattgcaaagaggaccatattcaaaatcacatacaaatgtcataatatttaaaattgcacgcgaatatcttttgtccatgcctcttacctgatttggggtaaagctaccagctaaaccctgctcaggtcatgactgtaatgcaattacccagagaatatcctttgtacacttttctacctgcagctcccagagtgcttgtgtggtatagggaaagggctacttccattttccagccttgaaacttgggccaagttgtttaattcccttctagcttcagcctcctcctctgtaaagtgaaaataagaactatctataagaggtttgctatgagggcaaagataatgtgcttgatgtagtgtctgctaactcaaactagacaccaataaatggtggcgattgatgtcatttatacactagcacatctattgatcttatgccttaacatagccagggtttaaccacttaaatcatattttttcaaagtatgtatttgtccttatcattcttgccaccttcaaaagcctttccatgcatcaagcacctcttcttagattaaatttctagatgggccagacaatgtgtctctgactctatttatcttcccatttgtatgtattttatttttctttcacttttttggttctcttctgagagatatttttattttaaaattcttcatataaaattgggctttccaaagcatttctacaaaaaaatcctggtcccaaggagttgatgatttgggaaagctcatccaaattaattattggtttgtttcctccatgtttattctaagacaaatattcagataatcagaaatgaatgggggaaataataaagtatcttcacatacttatttagaagctttgtacagattcagggtgagtatgggtgctaaagatcagaacaggtgctgccccgtagcctattggttctaaaagactgttaaagacagaggacttgaccttgatgaatgtagtcgagaacaataatgattctgtgagctgagtcacattggcgggcctcacccttttgttgggggaggaaaacgaaaactatctgaatatcctagaccaggtttttataaatgttaagagagaaaacagcttttagggtcaaaataattttgtgaagtagtagacaaggcaagtttttatattgtaagacttcttggagccctttttttttctttttcttttttttttttttgagacagagtctcactctgttgcccaggctggaatgcagtggcgtgatctcagctcactgcaacttccgcctcccgggttcaagtgattctcctgtctcagtcttccgagtagccggaattacaggcgcccgccaccaagcctggctaatttttgtatttttagtagatatgaggttttgccatgttggccaggctggtcttgaactcctgacctcaggtgatccacccacctcagcctcccaaagtgctgggattacaggcgtgagccaccaaacccggcctagagccttttacatgctcacgagtattaagtctctccaagagactgatatacgatgttgtatttttcaaaatgacaatgcagccctgttttcaagtaatatgtactgactgtttgtttctgactatatcttgagaacctagatgacctaagaacatagcattttgctttagcatatactgtgtatctcttgcagtctgttacttgtttcactgactcttttctaatcaccctgtgtcagggtctttcttgcttcttctctctgtctctctcctctgctctttcctctcctctgctctccatcccctcccttttatcctttcatagtcttcactatctgtatcatctttgtctcatccaggctccccatcctgctttctctcctttctcttctttgaaaggatatgatgccatctaatgcccagtttcattaggccaacgaatatttggtatgtctattctgaatgaattctctgaaggtacaaaatgcaaagccaaagtcgctgcagtgtgattctagagagcccctcatcacctaaactctccactgcatctctgcagcacgccgtcctggccaccagcctttgccaggctttcctgtgccgtccagttagcctttctggtatagtctgaatgtatctcccaaaaagcgtgtgttggaaacgtaatcccccttgcaacagcatttggaggtggggcctaatgggaagtatggagagctccaccctcatgcatggttaatggggattataaaattttgggcttgaggctgccggttcaatcccttgctctctcatgctctcttgcctttctaccttccatcatgggatgatgcagcaagaaggccctcactggatgtgagccctcaaccttgaacttctcaggttccagaactgtgagaaatacatttctgttctttatacattacccagtgtttggtattctgtgatagcagcacagtacagacaaagacacctttctttatgatcaacctcttcaaccccacccttggcaaaaagctctttctcaccagctagatcactttgatttttctcattctctctactttaaagtctttgcctgtaaattacttaaacatttgtctataatctgccttcaattgtttaaaggacatgtttactttttatttcaaacaaagggaggcagaatccacgtctcccttcttctcctgtccctttggtccacagcacgttgctgagcacacagagacactggctgtgaggtggggccagctcctctggcggagacagctggggttctattgatacgcagggcagatttgcctgctctggccggccaggcaggaaatgttcaatgaataagtgaatccttgttgttttttatgttctttggtgaatgacaatatttcttttgtcataatccctcaaaaatataaagaatgtagatgtggtttatggggaagcatctaaaacccagacaggcttttaccaactcagggttaggaagccacatttgtcttcctggtgggacatgaacgagctcagtatcattgactctaaagcagtagcctgctatggatttagaagcttggctttccggtttgttctctttctatggaaccgccaatgtttctgtgaactgctgataatattgacttgaaaaattggagcattagagttagttgggaaatgctttgcctctttttaaaatcaactttattcaggtaaggcttatatacaataaaatgcacctatttttagtgtattttataataagttttgacaaatttatccatgcacacaattactgcaacaatcaagatatagataccgtgctgtccagtagaatagccactaaacacatgtggctatttcaagtctaatgagctaaaattaaaatgaaaaacgtcctcagttgtactaggtatgtttcaaatcctcagtagccatatgtgactgttattcagcatattagacagtgcaaatggaagacatttttaccattgcagaaagttctgcagtgttggacagtgatgatataaaacatatccatcctaccaaaaggctccttcgtgctctttcccaaataatcgccaacccctacccctggccttaggaaatcacaggtctaatttttgtcactacagattagattcctgccttctggagcttcatacagaattcctctttatttgcctggctttcattcagcatgtttctgaggttgatctgctcatgttgttacatgtctaatttgttcactccttttcattgctcaatagtattccattgtatatatagaccacaatttacttatctactcacctgttgatgacatttgggttgtttctatttggcacaattatgaataaagaaattagcttttcatatggatatatgttttcattttttggggggtaaatatctatgattgggattgctgggttatgttgaaagcatatgtttaactttattagaggttaccaaaccattttctaaaacgattgtaccattttacactcctatcagcaacggaagagagttccattcttaccaattattactggttttattttgttttgtttgcttgttctattaattactgagagacaagtattgaaatctctacctatcattatagattttctatttgtcctttcagttatatcagtttctgcttcatgtattttgagacttcgtgattggtacatacacatttaggaatgttttgtcttttttatgaattaatccctttatcatgaaatgcctctctttgcccttgttctgaattctactctgtctgttaataatatagctgctccggctttttaagaaaaaaatagaatgcacatggtacatctctttctatccccttgtttttaatttatctgtgtatttttatttcaagcgagcatcttttaaatagcatatagttggtcttgcattttaaaatccaggctgagaatctctaacttttaatgggagtgcctagaccatttactttgaaaaaattaacaaagaataaactgtacatatttaaagtgtacaatctgaagaggtttggcatgcatacatctgtgaaaccatcaccacaatcaagacaatggacactgctttcattcccaagtttccatggacttctttggaatccattccttccaccatttctctctaggcaaccacttatgtgctttctgtccctataggttagtttgaattttctaaaattttgtataaatggaaacatagcatatgtattctttttgtcttgcttcttttttgcgtcataatgattttgaagttcattcatgttggctatttgttgcaatatttttccttttgatttctgtgtagtattccattgtgtggatataccgcagtgattttattcattcatatagatgaacaaacatctgggttctttctagcttttgctattacaaatagagctgctataaatatttttatgtaagtctttgtatggacatatgcttttatttcttctgggtaaatacctagaagagaaattgctaggtcatagggtagacataggtttaactttttaggaaatcgccaatctgttttccatagtgtttgtactgtttaacattcttaccagtgatatacaagagcaatgtttgctcccctttcttgcaccaacacagggtatcatttgtctttttaattttagtgattctatttggtgtggtgtttatttactttttccatttacctacataagtcttcttttatgaagtttcttctccaaatttttgccgagttaaaaaaatttagttttttgtctcctaagtctgatgtaagtccttggctgatagatgtgatgtattttctcccattttctggcttgacttttggttttttaatggtatcctcagaagaataagagtttttaatgttgacaaagtccaataaatcattttttttctgagttaagtttttaaagtgtttcaaatatggaaattttgtctacctaagataacaaagattttctcctgtgttttcttctaggagttttaagttttacatttaggtctatgatccatttgggttaatctttgggtagaacgtaaggtacacattcattttatttcatagatctagttgttcccgcaccactttttttttcggaagagttttcattccctccttgaagtgccttgacattttgtcaaaaataaattaatgcttatatgtgtgggcaaaatggtacatgatacatttaaataatttgtctgtaaatctcagtgggatacctgaataaaagagtgggccaaccattaaaaatgataattacatgattacaaatctcttattttcattaaatatagtttgctttaaattatttctttatgactattccaaaacaaatagaaaaattttctttgattctaaaaaccacatgactggtaacatccatattatgaaaacaaatcatcctatatgttactgagtgtatgggttttttggtgaacacaagtcttgttccagatatttgaatttgataatgttcacagattctagaattttctttgaatgcaaatacacttggaagtgacacatatacagagaaaaccaaaccctcaattttcctaaaaaaatccagacctatagcattgctaaaataatcataatttaactttttatattaggagtaccaaagtaagccaatatttaattctgtgacagaggagtatgaaaaagaaaacccagtggctatgaaaacagagatctaaaaatttaatgatttaaaaatagcctctacatacaagacggcaaagagtaatacagattgaacatttggttttaaaaatgtgaaatgtctccacttagcgtagatcaatcaagtcagccatctcctaagaaatacacattatacaatgaaatctacaaagacacactttttaacttcaagcgttgttgattttcagcaaccctcttcccacatgaacatttccttgtaatgtaatgtatgacttttaatcttcttttggcagagtaggactttgagaattataatagcagttgttttgaaaagcaccttctatgatcatttatttccactgatttttttttaatcactctgagatcatgcattcttgttttttaaatccttttctgttccaatgatttggttgtttaaaacaagcaagcttaattcagtcaggcatatattgcaaataaaaacatgtttccaagtaggctggaataaaaatgctaaataagaactgggccaaaagatcatagataatgtgcttcttctcttggtaatatgtgaatacatttacccatggggtagaagtatttcacctgccccatgaagaacctgatggcttgtggtgtctgtgctgtgtcaatactaacagatgtgaggagacagactatggaatggacgctgtgactatctgtgagatagtggaaggggttatacacactggccacaggaagttgcaaaaattagatggactctgtgtagctagccactcttgagtgtcaggtctgcatatgtgagttttaaagaaggtgcaagatagcaataaattcccttagagagcaggatatgtcctggtagctctatagttccatgatcaaggacctggccagtttccctcaggtaatgggggtagtagcaccaaagtgaatattaagagtcagaaaggcctctacttgcaactggcggatcaaaccattcccctattttggtgaacaatcatagtctgatacgcctttgtaaatctttgctgcaaatatggtttttacaactctaaaaacatcttttggaaaacctcatgactgaaccactcacaaatgcagaagattgaacagccccagggaggcaattgctctccttttattgtagctgtctctcagtattgaaacaacccaatcctaactgtggtcctggcctctaaacacacaggtctctcttccctccagcacctgaactatcagagcttggatccacatatatattctgaaatttgctccgcaagagggcttttgggcacttggccatcatgtgtttaagatggtcagttttgaaaagagttttccaaacaagaataagtcatgctatgcctcatgatttggaaggtgaacacttgcaaataaactatgcttcccagatttgggagtgccaggctcagaatcatcacaaggacgtggagaacaatattataaccagctggtatgtttttaacaacaacaaaaaaaatgcagcattagaaggtgcttactaaggtgcttcgtaattcatggttttttttttaatgaaatgcatcagacaaacatctacaaacaaacatgaatacatgggcatacaaaagcacgtggacaagttttctgtacagtttatgtctcagatacttctatgtatacataagaaccactcagggggaaaaaaaaagatttccctctccagctccctgaatttctgaaagttgactgacccataaaatgttaaaatatttcatttttatataaaatatctacaaaaatagataacatttacaaaaaccagacagtatttccagttttccttagtaaccgttaacgcagtccccttcctcttttttttcttctcagaacgttgccatctccagcaaagagcgcttgaacagctgggcatttctagaaaggtctgtcacttggtgcaccatttcctgcagggccgtggtgctggggtaatggagggcggccatcttggttgccatgactatggtcttgagctgctcgcagagctggttgctggagttcatgactttgttgcgaatgtcctgggcagtcacctgccgtgtcagcgtgtctccaatgaacaccagtttgtgtgcactgaggatgacaaacttgctgtgtgccacgaagattcgcgggggctgggctgagctgacacaactgaagagtgcgtcaatggcgttgagaagggaaatgaaatgggtctcacattggtcatagtagaagcacagcaactgccgatcctgagcactcacgccactgtttgtggtgggtaggctctgagagggcttccacttcgagatgtcattctccacgggctttgtaatctcttgttccaacagctggaactggctcagctgcaaggaagacgaaagcagatctcattagagcaagggagtgtgttgcaatggaaattcactaggccttggagttaaaagacagggattttagtcgctagtaactgtcagatgcatgtgagctgtaaagcctgggtcaagctgccttgctttcctaaattgtaaaatgtagacgttgggaaagatgatcctcaagctcagaccttctatgattggactactggtctcttgtaccctctggctagaaggtagcatagtgtttaaaccgcagccctgttacctacacctttatggaggttaaatgagttaacgtttacaaaatgcttataatagtttggtatgtagtaggctctatgtaaatgtttattaatgttgaggggtggcaagggaaaaccaaatgtagtgacctccttgtcaagtaagtcactgacagtttgctccttctcggagaaagcctcgactatctcaggatgctcagatgaaatgaccattcatgacccctttctgtttatcctactctttctgtcaagattgatagacatgttatgatccagcactacaggaagattaatgcatataaatatatgagcacttaaggaaaaaaagtttctaaggcagtctgaatgggaattgtgcatcataatatttagtcccccagagctgttaaaagaagggggttttacccagagtcagatgcatcaggtgctggctttcttccttctttcctcattgctaccaaatggtgtattatttaaattgcaattataataatttctagggattccactaagactcaagagagacctctcttctgcagataaggactatctgtgacctgagcttcagactcagttaatctcccacctggacgtagggatgagctggagcagtgatcacctcacccagcttccccagcttctctgagagatgcacagccagctttactttacttttctttttttttgagacagagtcttgctctgtcacccaggctggagtgcagtggcacgatcttggctcactgcaagctccgcctcccaggttcacaccattctcctgcctcagcctcccaagtagctgggactacaggcgcccgccaccatgcctggctaattttttgtatttttagtgagacggggtttcattgtgttagccaggatggtctcgatctcctgacctcatgatccgcccgtctcggcctcccaaagtgctgggattacaggtgtgagccaccgtgcccagccttcaacagctttacttttctagaatctgttttcttcttagcgattgctatggtttctacaagttccccaaagccctgcagtcttaccttgccagatgccaaggcaaacataaataggtacaaggtgatattccaaggtatttaatcataatggattatattttatatatcttaggctttatgcaaatatgttcatcaatatatcatgtcattagatggggggggtactttcccattttatagggaagtaactgaagctcggggaggttacctgacttgacatagttggttggccagaaaggattagaactcagatttcctaaatatagcatgccatttcatgtcattacatgccatttcacttcatttcatcttaaaaggcttgtaaataaatcctcaatccatctctctttatttgtatgcccttgttctagcaatagtcgtcattatctcccctactcatacccagcttttgaatgaacatgccctgcccaaagtcctcagtagataggcctggatatatgttgaaaacattgaattctgctctcctacctttagattggaccaaggccaggcaaaccataggcttgtgttgctggcgaaagagagacaaatagcgaggtagagacagaaagagagagagagagagagaaagagaaatggcccaatcaacgtggcccaatcagactctttcttgggaatctgatgaacaagagaagggagctaaccatcggaagaggaagccgagatgaaaagccatctatagaagttctgagtggccatttatgggttctgcaaagttacaggggagccaaatgagtagataattagagaaaaccagaaaataggtgagagtgaagtagactgatagaaagaagcaaaggaactacaagaaggagagataatttacagttctagttctccccagacctggctctatcttcactttctgttactgaattcccctactgtggctttactataaacctgcttgcttaggctagcttgaatgggtcttgtttcttgagaccaaatgccttaacccaaatagtcctcatatgttagatatgcaggtttagcctttaaaaaaattgccgtttagatggaacccaggtacacccagttgaactaacaaggtcataaaccttctctttgcttttaaaccccattccgtgctttggagctgattcctgccagtgagctggaagaatcaaaatcataatctcttgaagtgatacctttccttagtgctaggtgggaaatctttccaatgccaagcagtttttgctctgattgaacttacctgatgatgttccagctgcatcttgttctgtttcatgatattctctttttccaatagctctttctgttgcctctcaaactcctccttaccctgttaattttcaacataaagaacatattatgtcatcactgtgattcacttatgctaacaatttcattgacggatgagtaaatactctttattttccactgccttggcaacatctcaaatgcccagtgaggcactgtgaaccctagacgacaggggtggcagaaaaataaagcccattgccatatagggtgccagctttctggggcaccttaaaattttcggagagctactcatgattcccttcaaatctcatatataatgttctttttatagtctctgggttcttttctcatagattatatgtgaacctgtaaacccccaaatgcaggtctaaatgtggtccacctctcacttctagttccctcaaatcatctatagatttctgctccaaggcagtagttcccactgtgcagggtcagacaaccagtaagatgaatgttcaatgcctccatcctctctctctccacttccttcctcagcatcaggtggggctcagttctccttgccacactttcttgcgcttgagggaatttggcataatagttacgtagttctcagtataatctgtgactctcagtcaaattaaaagaatggcagaataagatagtaagcctagtcctaaacaatggatcttggtagatttttttttttttttctgagacagagtctcgctctgtcgcccaggctggagtccagtggcacgatcttagctcactgcaacctccgcctcccaggttcaagtgattcttctgcctcggcctcccaagtagctgggactacaggcgtgcatcaccatgcctggctaattttcgtacttttagtagagatggggtttcaccatattggccaggctggtcttgaactcctgaccttgtgatccacctgcttcagcctcccaaagtgctgggattacaggcgtgagccactgcgcccagccagtagaatgttttaatccctcaaagtggaagggaaagctgtcggaatcccaggtcaacttggagcttggtagaattcccaattgtaggaggccaactgtgactatccaatgtcccatacacagattaagctcctaggacagctagctaatgcccagtggtcctctaggtaagtctgagatggggctaagttttaaagcaattatacacacacatacacagagtagggctagcaggggccttagaaattctctggtgcaaaggtcttctattctttttcttaatgacgaaaacttttttttcaaataaaatattgcatggaactatacataaaacacaaatagaagtggagctggtattattattagagggcctattatcctacttggtgagtctcctcttacctgaggtatatcaacgggatctaatccaaccccttaccccattcattttgcaaatgaggaaattaaggcccaaggaggttgaataagttggtcacacagtaaacgtcagagaaagggctagatctgagtgagtactcaggactctcagcccagcgttcttactactctacgacactccctccaatttgtgaaccatgtagattaacattaattatgttctctcctttggcagtccaacccgacatccttataggcatctttctcaggctccctgcatgtgagtgagtgtaggtgttttatgagttccgctgttttacctgtaggtggacgtaatcgtagtcatccatccagctcctctcagaaccatcactgctgctacagtcaggggcctgctccttgctcaggcctgggggcagtgccttgttgtgggcctgggccttgtggtcaccaggatgcagcagctgtccctgggagccaccgtgtgggtactccgttgagttcatgatgctctccggcccattcttcagatgcaagctgccagggccgggtctgaagagggcctctgcgttggtgttgatggttgtggtgagctgcttggcgtcatcgggcaccgtctttgccaccatcacaaaccggtccagatcgtcacacttgttctggggcttgttgatggccaagatattcagggaccagctgcactcatttaagtcatggctggtttgactcaggatctggtgggagtcttcaactcgttgcagctcccgcttcatcttgttgtggaggatgagttccgggaggcaggcagcatttgcaacagctcccttgacaaagtggaggtactccttcaggaacagctccaccttgtccactgctgtgcgtatttcattgatgtgtctttccatatatccgtaacaccgccagtcggtagtgaccagtgccattaggctggagacacccatctcaagggcctgctggagccgctgaagtctctcaatagctgtgtctggatccaggaagagccttttgtcctgagctggggaggctgacagtgaggactccttggaggaggtggaagacgtggacatgttactccgggtgctgcctgtactggagaaagacaatcggttgatcccatccaccaagtcccgagagcctttagcatctggcgggttatgcagagggacatcataaacaccatccctttcctgggggtttgctttctcactggtttctgctggtggctcaagaaactgaacgcctcgggggacatcatatgcgtcgttctgagagcccactgactgtccgagttgcgggggtgggtgattcggggacaggctctggtgccttcgagccaccggttctgcagctcctggaatgtcacagttgtattttacatgaaggtccttccctgctggcttggtgcaggttggaggaatgtcataaaccccctccggtctgaggtccggccttccagcttgtctcatgggaggggggaagtcatagtctttttccctaagccctgcttcatcccggcaagcagagggcggaatggcatatacctgcaaagcaagtagaaagcgaaatgctatttattgagttggctcatgggaacctgtggtcccatgtgctcagtcctatttgctggcactttttcggtcgccctcccccgccccaatgttaggcacttccaaggttccccgttattctgctgtcacttcccttgtcctttgccaagtgtgtccaaccccacgttcttggtgcagactcgtatgtacaaccctcctggctaaattgctcaccctgtgtttccagtcctgtgtttctgaccacctcctgggtatcctttctctgctgatctgtgccgagaggcagagtaagaccagagttctcccccggtctttttggttatcacaccagctgtgtgatgctgaatgagctgcataggcgtctgaaacacagtccccttgtctgtaaagtagggattactgtgcctcctgtgcaggcataccccatagggtaacagagtgagtcaaacgagttcactcaaacatacacactgaggaaactgtcaaaccctctacaggccaggcgcggctcagcctgtaatctcagcactttgggaggccaaggtagtaggatcatttaagcccatatgttcaaaacaagcctgggcaacatagggagacaccgtctctacaaaaaataaaatttatccagtcatggtggcgtgcacctgtggtcccagctacttgggagcctgaggtgggaggattgcttgagcctgggaagtaaagactgcaatgagctgtggttgcgccactgcactccagcctgggtgacagagcgagaccctgtctcaaacaaaatgtaacaaaacaaaacaaaccctctacaaatatatattagtacttgccaaactgaactaattatcttccctgccaaagggttatccttattggccacctagtgttttttagttggggcttctcaatatgaaatccctagagctatctttaattagtgcctttccttttttgcttccttcctttactctcaccaagactacattttccccttttgggtttgcctttcttgttttattcgagtgaactacttacccaccctcccaaccctgcaccccccgacacacagacacacacacacactcctttttgctgctttgtagtcactcactcaccccttttgtaggcgggatgtcatacaccccttgaggttttatctctcccactggaactgaaaacacagggccttttgctgatgagggagggatgtcgtatacctgaagagaaacccgtgagttacccagaatggaaatgtcttatacttggtcattttttatgctcctaagcacttaattatggatttatttaccaggttatgtacaagcttgatctttggcagtgctccatgttataacagatttattgcctttttttttaatacattttatggtttttaacttacatttaatataaaaatgattttggccaggcacggtggctcacgcctgtaatcccagcactttgggaggctgaggtgggcagatcacaaggtcaagaaatcgagaccatcctggccaacatggtaaaaccccatctctactaaaaatacaaaaattagctgggtgtggtggtgcacacctgtagtcccagctacttgggaggctgagacaggagaatcgcctgaacccgggaggcagaggttgcagtgagctgagatcgtgccactgcactcccagcctggtgacagaacaagactctgtctcaaaaaaaaaaaaaaaaaaaaaaaaaaagatcttatgtgaaatatctacgctgtctgtactttaaagtgtagtttaaattttctactttccagctgggggccgtggctcacacctgtaatcccagcactttggaaggccgaggtgggcagaccacttgcagttaggagttcaaaaccagcctggccaccatggcaaaagcctgtccctacaaaatacaaaaattagtcaggtatggtggtgtgtgtgcctgtagtcccagctacttgggaagctgaggcaggggcaggagagttgcttgagcctgggaggtggaggttgcagtgagctgagatagagccactgcactccagcctgggcaacaaagtgagattctgtcttaaaaaaaaaaaaaagaaaaaagaaaaatctactttctgaagcaaaattgtagaagaacataagctctcttgggtgaaatactaggatttcctgataaagcaaatccagaaaacataatttaaatagcattggctaaagtggctactgggtagacaacctaaacaaagcttcatatgacatatattaatgcataatttgtgaactcccttttctctacagccctgaaggaatgctacccttagaagcgcttctcctcttgtgaccatgttctggtacgcaccccttgagtggtatgagaaggagggatatcatagacgtccttttggtatctggatgggtactcgtatacgtagccatggcctgtcctcacgggggttatcacctgtgggagagaaggcacagaggtgtaaatttccaagcctgagtccttgaatctccttgcctcctaactaagcactcatccctcaactctccctcataaaaagatagaaagaaaccaaagaaagaagacataacaggaaggagacaagtagacaccacgttagtaaacttttttttttttttttgaaatggagttttgctcttgctccccaggctggagtacagtggcacaatctcagcttacagcaacctctgcctcccgggttcaagtgattttcctgcctcagcctcctgagtagttgagattacaggtgcacgccaccatgcccagctaattttttgtatttttagtagagacagggtttcatcatgttggctggtctcaaactcctgacctcaggtgatccacccacctcagcccccaaaagtgcagggattacaggtgtgagccactgcatctggcccaggttagtaaacttttaaatccctcttgaatcccaatgagaaaaaaaatccctaaaatatctctatcacccttaattgtgatcatctcaaagttcatcagatagagttgatgcactgcaagcatatttctgaaatatactttaagggatacttgtgtgtaacttatgaaagtcctagaggagcattttgcatctaaagtaccgcatactgaaatttgctttaaggctctgaaacaatttgtaaaatgaataatgcaaatagagtttagccacttaaaattcctctcatgccttcctcagtatgcctcttcattggacattattatgatgattataactgtaattccacaggtcaccagagtacttttacaaagccaatgctcaaactgtgctgtccttagaaacctctgggagctttcattctaacgtatcaaacaaacaaaatactgagtcagggaggcaccaggaacagaattcaggtctcctgacctctggtctctaatcattttcccatttccaccaggaaagaaaacatccccaacagtacctacgtcaagggatatcagaagtcaaatagcgttcatcacgatgctggcatctggaaccagtgccaataaaatgaatcttacctagcagcctcctgttttcatatctacatacttcattggtgtgctaagcaccagcaaaaaattatttgaacttaactcattttgaaatatatgtaatcgtccaagggcttctaaatgcccagggtcttgtttctgcctaacccccaccctttgagtcattgagtgcccatctcaagcgttgcccacgacatctttgaggagaacagacattgcaaatgaggaagagttggttgttccctaagaaaccgtcaacttttatcctttctctgaagtgaaaactctggcgtcaggctgcctacagaactatgtgaaaaatgctccacgtccatcttatgctgaaatgggtggaactcagccaaatgcaccaatgccttctccccaggcgctctcaaaatgcctgagttcaatttggcttttaatccctagtgcttacaactgattgtttcttgcaacgaagtaaaagagattagtatgcactcaaaatttccatcaagtctctccactgtcttgggtttaaaaaaggaacctattgctttgaggtctgttggcatggagcatacggaaccactttatagaatggccactgtattgtgcatagcaaaccttccttttcaaagcaggatgccctttgctaaagaaaaacacaatgtgttcctaatgcccttatatgattgtttttttttttttactcgctattgtccaggagagaaatgaagatctccccttagtctatttcatcagcccctctacttagagcgctgtcttggctttatcatagcacctgctcatagtgcagcttttgttcagcttaaaagtttccaagagtggattttatccaaggttgccaacttagcaataatgctaatggaaaaccaaggctaagtccagcttaactgttcatctttcgtttaaaaaacagaagcgggcatgtcgggcgcagtggctcatgcctgtaatcccagcactttgggaggccaaggcgggagaatcacctaaggtcaggagttggagaccagcctggccaacatggtgaaactccgtctttactaaaaatataaaattagccgggtgtggtgacatgtgcctgtaatcccagctactcgggaggctgaggcaggagaatcacttgaattcgagaggcggaggttgcagtgggctgagatcttgccactgcactccagcctaggcaaaaagagtgaaactccgtctcaaaaaacaaacaaacaatcaaacaaacaggctgggcgtggtggctcacgcttgtaatcccagcgctttgggagggcaaggatcgcggatcacgaggtcaggagatcgagaccatcctggctaacacagtgaaaccccatctctactaaaaatacacaaaattagccaggtgtggtggtgggcgcctgtagtcccagctacttgggaggctgaggcaggagaatggcgtgaacctgggaggaggagcttgcagtgagccaagatcgttccactgcactccagcctgggtgacagagagagactctgtctcaaaacaaaacaaaacaaacaaacaaacaaaaaacccagaaggggattgggagctagagtgggtggcgttggtgtctgaaaatagcactaggtgacatataaacacatagcacgacctcagaaaaggaaggcaggttcaccgctaaagtgtttccttgcctttgtggatcttccctggcagaaagcgctaatgcttcccggtatttaacatttcacttcctgacaaatgtcacagaaccccaacttgctctctctttctcatttagaggatgcctgtggtcttctggttttttaaaactctgcattccaaaccagtcattttccttgtttatgcattcaaagaaacagatggtgaaaaccacaggggggaaacgccaaccgaatacagcaccccccgcccgccaccaccgattccagccttcctgacattaccatctaattcacgttggtccacaaatggcatttaaatgggaccaggatgcaaaatgctggtcccatttaaatgccaagtccagtgcagcaatccgcattgtgacgtgtggaagatcagggagctcgaagtcttctacttttggacattctctgcctcgacctgttgcttgggtcactttcatgccaattgtgtgtcctctcctcggaggaaaagtgctgactgagctgtaccttacaaagtctccagttttgtggttcattaaggctttttcttgctgcgtgacataagtacacaaaaaccttccaacgatctctcctcattccacctcccagaactgctgaatttcagctgaagacgcacaccaaggtctggttaaggggacctcaagtttggaagaattctcctaggcatttgttcggtgaggcattaaaggaattgctacacaaaggacatttttaaactaattttctcaatgaaatcaagtcaggtttttcatttcctttccccctctgtttgcttttttttttttctacattcctttcattctgtgcatttatttatagttacaaaggcttagcctttggaattaccaaactgacctcttaattcattagtgttgccaggaagggggctgaattgtgaggtctcctggggctctatgatccaatgctactgcaactgctttcgtgattacccggcacaggatttgcactttccatatgtggattttctgtccctaggaggaatccaacctttctcagatgttagtataccattctcagtaactaacgggagggtccaagacagagactttgagaagagctatgaagccgagaagggcagattcttccatttagaaaaggaagaatccatttaatacatctccaagtctgggtcctggcaggataggatcaaaagcccaaagactggcgttatgttagttctctaattaatctgcttacataaaaacaaggaaacaaactcgaattgccccaccccacactttgatggtgtttgatccacactgttttgagtctcagatcctggcggcatgagtttctggagatgcttttgacactttcatgcctcataattttgaaagccatgtatgctgaaattttaaagaggagggtctgtgtttggatagcagagagagatagggaggtctgagaaccagcatgatgacagtcagcaagttggatgagaggcccttgggactctttctgatgtttctgcatctgtgttccctgagctggtacccatagcagagcaagggtcctatactcagatgctcacggaccgagcaagcagggtgtagggaagaaacaagccaggctttggtgccggggagacagaactccttctaccgaaagagggaagacattgcgccctgtgttgccagatctttcacgttttcagaagccagaaatttggaattttatgtgaaacctggttttcaaaattgacttaaattttaaaaacagtgtcttggccaaactaaacgcgtctttggcctccgggctgccagtctttgccttcatctgtgtatttttgccctccttcctcttggaaatcttctgaaggcagggcccccaggctctgcaccaactccctccctcggcgagaactgagctgtccatttccacagatgccctgcacgcccatacctctgtgccttcatccatgccatgtccttgtctgagatgctcttctttctttcctcatattcaaactttaattgattttcaaggcccggctgaatgcctttcccccaccaagcccttcccaaacagataatatgtctctatccttggaactccctgagccagtgatccacacatctctgacagcacttatcacttgtggtttgacggtcttgatgcatctcatctcttcttccagcattttaaagtcagagatcattccctcttcatttaaatataaaccacagggcctagtacagtgcctagcagagtaggtcttgcataatctattgagtgatacattaatcaactaaaggaaaactgaaggctattaagcaagatggcgtgaggtctgccactacagaataagcttggtttccaggtaagccagctctgggttaagtagaacccatgggatatggggcagaacagtgccctatcagccatgcatggtagtgttgggcaagagagggatccaagaaggcaagggaatgttaggtgaagttgagaaatcagaaactgtagaagaatgcaccccaagttgggtgaagccactattggcaggcaaggagggctgctggatggtttccttttccccagttgagctcgtatgtgacatgaacacctgggttcttcttaaccacaagccagaaacatgtgggggagtgttttggaaaagggaaaccaaaacaaaccctgctttttacctcaacatcagaaggaacatacgattgctttagttctggggatgtgtgataggctcgtttatgagaagctgtgtgccagaggccatggccccactgggtctttttctgttgcttattggaagaattaggtctgaagagggaagtaattgacaaacagaagctggactcaggcagagctggatctaaatcccggttctaccactcacaagctatgagaacaaaggttccattctaagcctgttttctcataggtaaaatggaaattatacttccctcataggctatatgagtattaaatgagatcaagtgcataaagtacctggcataaagccataataagccttagctattgttattgttattgtaattgtcacctaggctatatagattttaccttttgactttgacttccagaaatcatggactaggtaattgagattaaccatcttgctgaagacaacttaaaaaaatgaagaaaagctaggaaagatctttttttttttttttttttttttttttttttttttttttttgagacagagtcttactctgtcgcccaggctggagtgcagtggtgagatctcggctcaccgcaagctccgcctcctgagttcacgccattctcctgcctcagccttccgagtagctgggactacaggcacccgcccactgcgcccgccaccgtgcccagctaattttttgtatttttagtagagacggggttttaccgtgttagccaggacgatctcgatctcctgacctcgtgatccgcccgcctcggcctccgaaagtgctgggattacaggcgtgagccactgcgcccagccgaaaagatcttcttaatagtgtcaagagttcaaggataataaagaattactaggtcaaactttgggagaagagttaatagaggtgagattgcttttcaagcctgggggcatttgctattttttgctgatctgaaactggtgcctgggaggctgtgctgggttttctacagcttctttgggtaagggggaacattggactatagggctcaccaaggcagggaccccaaaccacccccgactttgggttggaaccctaaggactgtatccaaaataaggattaactggaagtaaacccacccttgcacaggctgaagacatcagggttgccagaacagctcaaagcatggaatcagatgtatgcttgcctatgaggctggcagaaggaaacaaaattctctctggaggcagagaacatctttataggcttcacattatttctacaaatgtactgaaaatacaatgtcccacatacaatcaaagataaacaggaattcaggggacaagacaacaggaacaagacaagcaacagtcaattcttgctttctaatgtgataagaatgttatgtatgtcttagtaatcacagatctcaaggctgtttcctttcaaaatgttttaggatcaaatcatgggagaaatgaagatttaatcattcctaaatttaagtcagatagaaagaaatcaatctttaggaatgtatagtgctcaaaatgagatctacgaggcagtgagaatttcaaaccaaagcagcaaatggtaagagacagtggtccttgatgatcatctgtagagttcttggggttactgttttctgctgttcgtatcagtattggcattattacggttatcaccagagcagctcaagacacgccaatgggaaaccccaggagaaaatgtgtttttccaagtctaggagatgaagatatttatccaagagaaagacggcaagcctccaaactcaggacactttattaaaatgctcatcagatgagatcttttcagtggaggttcacaagctggtttgtttagaggctctcactaagaaataggacacttgcccatctctctggaacacctagagacaaagcattttctgtcaagacaagttctgctcacattgtgtcacttgttcaaggtctcagcaagtctccttgggggcacttctttccttgggcatccacttcacctccttaatgcagagctggctaggtgcctgggatggggcagagcagcggcagcagaggccatgtggtcagaacttcaacttctcagctgcatgctgctagctcaatggagcactaagggaagcgggaagggagcagacggctgccactcacaaaggccaatccccctccccacagcaagcctcatatccatcatgttttgctatgtttccttctgatgccagccctgtgggtcacccacccacctacttatcatgacttctcatctctcccctcacaacactgtcttgttttgactacttccctccttccatgtgcttccagcaaccctaagtaagaacaaagcagtaaaaaaacgaagcagaaaaatcctactctttgaaaggaagagttgggtagagtggatgggagacagagagatgggatggagaggagactgggtaacttcactagttagtcatgctctagtgacttattattatttatacttctacattatctatctatctatgtctatctttgtatgcatcaaaattttaaaaattacaaatatatatatattttgtcattttaacaagattttaaaagataataagaaatattacttgaaaggttttcttttaagagaatgatgggacacagacctgttctagattctatgtcccgtgattcctctgagtctaagtctctacaatccaaagcaacattacaaatagcctgaattgtgcaatcctttgcctccaatatagagatagtgacttgattattgaccagtggagtttacccatgaatttagtagagtactaatgtgtggagtcagcttcttgtgtccttccctaatgcctagtcaggagctaggtaacccaggatgtgctcaggaaataacaatgggtaattgatgagaagttaaaaagtgtccccgtgctgtaatgattacagatttataacctcaccattcatagtacctacgattctctgaatttaaaagtaggttttactaagtaacagccatgtatttgcacttttcttggcatatgtgggaagtaaaatttgactgcttcctgtctatctctaattcctccccagcccctgatttatttatattatctctctttgcgtttcatgaattaacaagagtgtttagctttccaaaactgcctgttggaaagggcttctttcacttaaatgcccttgaaaagcattaacagagctaccacagtatttattagactttataataacctctttgtcttaaatgaactatttgatcccttccctttaaagaaaaccttaggaaaagaaacattaccattatcactgcctgcccattagaactgggatccaattttcagaaactgtaaagctacagaggtttgcctgcttaaaatccaagagtactagttgcttctctatgaccagaagaaaagccacatgttgcctaccctggatttattaattctctgtaaattcattctgcccagcttgggtgtagcagtgagctcatttatttacttgcatagcaacaatataatgaaaactgagtctggccttaaaaatacaccctcgtaagccatgtccaaggttaactcttccaaatgcttctctggtgctcatgaagttttttccccatgtatttttgaaggtgaattactttctttcaaagtcgttctgatgcctgattttatgccagaactaaaccttttgctagccacatctaaatcacagccagcttctttccccagtgaggaaaaagtcacaagtggaagctcagaagtggagcagtggtgctcctgggtcactttcatttgacacagcgttgggcagcaaacccgctcaatggaaacagtgcccctattgttaagcccctagcatgtcccccctgctgctttcaggaagctctttgtgtagccagtgctaaagcaatatttagttatagagtgaccaagcaccagcgagcagctagaagcatttaacatgaaagaacacgacgggaaatgacgtctgggtttcacgagtggttgaggtctttctcagaacaatgccaaatacaagcctgtgacaagttggatacagcaaagccattttttttctgtctcatggactgaaatgttctttgaaagaaaactataaaaaagcacaagtattgtggctcttttgatgtccaaataaattcaacaggactctgagcgctacatctagattgggaaatggattttagagagatgcccacagactgccctaaggggaaagggactgtgaagaggaggtgagagatgagaattttgggacccaaatgccgattggtatcatttcttcctaaagaggagaacgctcaggtttagttggaagaagggatgcagtggctgatggggcaaaccactcacaaggcagaactcggtgccagctctgaaggtggttgtcgtgtccagagacaacaggcctaaaacgtctgcaaaatccaagaggattacataggggaaaatgggcagaaaacaatgagttccaggatgaagtgctttcttagctcttggtaacaaaacagggatgagagtgctccttaatggggaactctggaagtttttttgggtacaggacccaggtctgtcaaacactgattctcactggctcagcacactccagtccctgcctccttgtgtccctgcctgctcctgctgtcttttggcatagctctgtcttccaaagggcactgtggttctggatgggatggtgggctggatcctaaaggaagagtaggaaagatttgcaaaaacttaagggtcaagttgaaatttataatcaatgcttgagtatcttttctttaaaaaaaaaaaaactcttgatgtcaggccgtttttattaaactgttaaagtgattctgagaaagaatcagataaggatatctggatc

SEQ ID NO: 51 - DNA, 699 bp, Homo sapiens
  Genbank Accession No. AJ245902
tcccaaagtgttggcattataggagtgagccaccacaccggccaagatgcttttcaaactgatacagatgacaatgggagcctcataaagatggcttttgtttcttcccttcaaggtcatttacttgtacgagacagaaaaagatagcattggggacatgggatgggggagggagggcaatagtggaacgaactttccatgggaaactttcccttttgtaagttgagggccaggggtagggatattttttagtttgtgattttacatttatctgtacatactttttcaagattgatcatttttataaccatggttttcctgaaatcctcaattcatcaatatgaaggaaatgaaccacatagactttatgcaataaataacagtgcaagtgagtataactctaactgatgttccacaaaacatttttgatttcaggtttgtatgatgtagtttttaatcgtacattttcatatgcttcaaactaacacatttttaaagctttcccccacttttctctctatttgtattgttagccatcttgaagtgatgttgtttaacataaattgtactgttgaatttggctttacgggtgtaaacactgatggtatatcagtatctgagaccccaaactctccaaatactgatggtgcattttattcttgaagtgaaatctgtgcaataaaataacagactgtctgc

SEQ ID NO: 52 - DNA, 521 bp, Homo sapiens
  Genbank Accession No. AF085871
ttttttttttgcagacagtctgttattttattgcacagatttcacttcaagaataaaatgcaccatcagtatttggagagtttggggtctcagatactgatataccatcagtgtttacacccgtaaagccaaattcaacagtacaatttatgttaaacaacatcacttcaagatggctaacaatacaaatagagagaaaagtgggggaaagctttaaaaatgtgttagtttgaagcatatgaaaatgtacgattaaaaactacatcatacaaacctgaaatcaaaaatgttttgtggaacatcagttagagttatactcacttgcactgttatttattgcataaagtctatgtggttcatttccttcatattgatgaattgaggatttcaggaaaaccatggttataaaaatgatcaatcttgaaaaagtatgtacagataaatgtaaaatcacaaactaaaaaatatccctacccctggccctcaacttacaaaagggaaagtttcccatggaaagttcg

SEQ ID NO: 53 - DNA, 178896 bp, Homo sapiens
  Genbank Accession No. AC008041
gaattcaaacaggttacatcttgtggcctcctcaagtggccttttgtacatctatgctggaatggattagacactggctttacaattgctttcattggataataataataccctaattatttagcttgtatctctaccaaagggaactcccacttccaattaatctacgcttcctataaatcattctaacagtgtctaatgtgaatgagtgtccagcagtgctgggcactatgctgagtacttcatataaattatctcacttgatcctcaccatgccctaagggggcatttactatctcactttgtacatgaagaacctgagagtcacgtaggtgaagggccagctcaagtggtgaagacagaatgtgaacctaggaggtcccagtccaagacagcaatcttaacaacttggcaattttttttttttttttttttttttttttaccatttagtgcctgagttctgaaatctggctttacaaacactatgtgtgtgtgacctgtggatgatctgggcattattatattctgattggttgaagtttcatggttcgaatgtcaaattctaatggaggcataagagtgcagattccatgagtgcttttacaagaagttgatgttgcttgggttttatgttttatgttgtatttagcacaaaagccattttaaaaaagtgttataaggaaatatctgaaaacattcagtccatagaccctggtgatgaaacgtcccccaaacacaatggctcactcagaacatactcctatggaatagtttccacaaatcaaactcatacgaatatagggaggatacataagaatgcaaaatcaggccaagcctgctggctcatgcctattataatcccagcactttgggaggccaaggcaggtgaattgcttgagcgcaggagttcaagaccagcttgggcaacatagtgagaccttctctctactaataataagaaagattagctgggcatagtgactcatgcctgtagtcctagctactcaggaggctgaggtgggaggatcacttgagtcccggggttcaaggctacaatgagctgtgatcacgccactgaactgtagacagggtgacacagatcttgtctcaaaacaacaacaacggcaacaacaacaacaacgttctgaagcatcacattagccaggggtttctgaatacttactttgtaccaatgttactttaagttctgcatatatattactaggttggtataaaagtaatcgtggtttttgccgttatgtttaatactttgcaccaacctaatagctcacagaataaaaaaaaaagtctatgaggtaggtacagttttcatccttattttacaaatgagaaaaggaggccaagaatgataaagtaacttggtctcacagccagaaagtgatggagccaagatttgaacttgggcagttggactgtgttcttagtcactgtgcttcctgggtgattactgtgacccttgtacttgacactctgctatcaattacaagagccatttctgtgtgtgcacttgatttccttggggtctccagggaaatgtaattgtctcctcaagtccaggctttcctagaagacatggtgattgcactgataaccagcattagggctggctttgggaaagctcagtacctatgatttatggttagtatcttagattttagaacgctgagcaggaagtttttgtgctttctgaaatcctcacacctttaagtctcatgattggtgaggaggcagtggtccaagggaatggatagaaggagataataagataagccaaatgtttcaaagggagtgaaaactgttgaatgtaaatgcagctcaaggaagacttccctatctgaataaaaaggtgcaaataatgcggcctatttgtatgcatggtggcttaatgatgttgatggtgatgatgatagctttacactatcagagcgctcattctgggctaggcagttttctcagtggggtacagatattaatttatttacagtgagccagagaagtctgctgtagcttttaatgcgtctaaaatgggacacatgaaccccttaggaattttcagactgatcaggacagtttcctagaaacagttcgtgaaagggatgagatgggcccatggtatctaccccttcctagctgcgtgaacttgggcaactcaaccttcttgtgctgtttctctatggctagtgcgtgtaatttgttgttgttgttgttgtttgcttttgagacgttgtctcactcagttgcccaggctggagtgcagtggcacgatcttggcgcactgcaacctccttcaagttattctcctgcctcagcctcccaagcagctggggttacaggcatgcgccaccatgcccggctcatttttgtattttctgtagagatggagtttcaccatgttggtcaggctggtctcgaactcctgaccttaggtgatccgcccaccttggcctcccaaagttctgggattacaggtgtgagccaccactcccggcctagtatgtgtcattgacaattgttcctacctcaaaggctgttatgaggattaaatgagctaatgcatgtaaaatgcatctgcataatatataacacagctcgataaatgtgagttgctattgttgattattatggccacgtttgccgctgatgatgttcaaccactgaaaagcatcgttttctttcttctagtaactgtgtgtactgaatgcctcgcgtttgtccctactgcacttttcagtctgtcacaatcctgggtcgtcgggggactgtaccgagcgcccttggagtgctcgcagcagggaagaaggagcgagcagggaggagctgaggagggtcggagcggaatggacacccagagactgagatgagagaggggctataagaagagaaaccagtcgcaggaaaacagaactctcgacaaacgcacgccctctttgcgctctccgtttctctggacctggatggaattgttttactttgcatcgccggactgcgctgcggacggggtggggcggcccaatggcccccctggggttactctgctccccttcacgcttccctcccggccccgccccgcgattggccggcgcgccccggggctgccgccgattggtgctcgccggccggagccgcggggcttaaagagggggcgggggcgcgctgcccagcagcgctgctgtccccgccgtgcgcccttcgccgctgagctcgcagcctccggcgcccacctccacctccagtgtcccgcctcgggccgtcgccctccagcggctcgcgagcgtgggagacgtacctgggcaggcactgtccagcccaggcccaggcacagccgtgaggggcgaggcacggggacatcctggcggccaccatggtggccacgtgcctgcaggtggtgggcttcgtcacgagcttcgtgggctggatcggggtcatcgtgaccacctccaccaatgactgggtggtgacctgcggctacaccatccccacctgccgcaagctggatgagctgggctccaaggggctgtgggccgactgcgtcatggccacggggctgtaccactgcaagcccctggtggacatcctcatcctgccgggtaaggacccgagcttggcggcggctcccaaatccttatcctctgggtagagagcgggatattagacggcgtcacagagacattttgggggcttgaagacctttgggtacgtttttgacatccctagtcccaccttgttgtaaaagaattaggcagccccgaacttaacttctctaggccgcagtattcttatctggaatttgagataatagtggcaatgtggccggtggtaacactggccgggtccctttgagaatgaacaaaccggaacacctaataggaactgagtccgtgttaattactgcggtcccagcccgcatccttccaccgtccgcttcccgaagtgcttcccgctcccgcccggcctcccccggggcgccgagccttcgcgttaggttccgcccgcagaggtgagaaggagcgtgtaacacaagctgacaggagaatcgaaccggctcaggctgagtttctcggtcctcatgggatgggcgaagcgcccccggccaggttagagccctcctagctccgtccgcgcagccgctgagcaattcacgtccagggctctctgggctgcctggtttgggaaatgtcacgttgattcccgcacgtgcccagggccatctccgctgcccccgctacccccgcccctgctgtgggcgcgtcagactgcggggctgcggtgacgccggctcccgctccgcgccgctgggttggatagggacgagcgggcgctcctcggagggcggactccactggggagatacggagcgcgccgccgagggtcgctcgccgccacccctccagcgtgtctcagattgggaaggggaggtaaaaattgacagcctagcgccggccaggggccacattttcacatgtgtcctgtggaaacattttgggcgacagcctcaattcagatttaaaccaatgggttgggcaatggcgaggtcgcgggcacccccttggttttctgctggaatctctgctctacccccaaggcatgtccctacaaggtgggcttctgtcccccagccttcgtggattgtgctcacttaaaggattttcccggtttcctcaagatggggagaaacctgtccctgaagccgccagtcagataagactgtgctcgccccttaagcctcctccaagcacgccctatttccggtcctcgcagtcggaatctgaatccctcctttctccttgctgcctagtacttggctcttatcctcacaaaggcacattttatcttgttttttgttgattgttcgtgagtgaagttctcccactacgttttaaattccttgaagatagagatggcgtcctgttattctctttgcttcctcttctggacctggcatggcctctggcacacaatagctgcgggcagtgcttgcctggtttgccttacgctatcctttccttcattttgaactttcagaaggccagaggtcaacgaacgcagatctagactcagctttggctaatgctggtgttggcagacccgggccagcctccggcatccaggactcacaatctgggtgaggggggacaaattgctagcctcagtgaaccacggttgtcttcttttaaaagttaaaatcagatcaaccacccatctttcacgattatttgaggattaaatgagataagaaatgtaatctcctttgagatagtagatgcttcatgaatggtacctatagtattttattaaaagctgggcatggtatttgtagggatctttgaagcataaaattaactttgttttcttctcctgaaattaactttactgagcattcagtgccaagtggtttgttttcagagaacaaaggctgtcctccagaggggagtgcatactctgggggtggggggggggtggggggcggcgctagtccttcctgccttccccctccctcatactttgggtggaggcaggaacagtcctctgtccctatcttttggtgtccggacatggccttggcactgtagcatgtggacagccagtgccatggatttcagaacctgcattgccagttgactgcctgctttgtgtgagtactggctctctacaagccgcagaggcggacggctgggtcaggggatgggcctcagacttcctggagctcctttctggagatcttcaagtcagtagacacttgactgattatctttaattctgaaggagctgagatgggcagtgctggaagagggcccttgtgaagtccgaattctggcaaaacgttccttgctaagagacagcgttgaagttaggcctttttgcacgtgagggtcgtggtgtgtgaggcagatgtcggctagattcctggctttgctatgaactctgcctcacccaggccactagtactagttccttctgagcaaaaaagggagggtaataaatgtgaccccccccaccttttttaagaggagggagagttttaatgagaaacattacatttgaaagtgaaacaaatttgtctgtgaaattctcccagtatcttgtcagatttattctaaataaatgtgacacatattgtaatctgtttcttaatacagtttttacttggcattttacttgacaggataaagttcatgtagttttgctctactcttctatttttcagttctcttattccttgattcgcaattgtttccatgatctgttgtgggcactgtgttaactccgtgaataccaaggcaggtgtctgccctccaggaaccctgagggctggagagatgccttttaagcaatgatggacagttggggaaggatgcccagggcactgtgggtgaggcaggagatggggtccaacaatttaggggcaggatccatgaggacagcagcctctggggagacagcaaagagaggaagcctgagtcttagtttagtctgggttagggccacagccaatgtgaatgaaagcacatggttaggagaaaatcacctaggacacctgaagatgaaagcgctgcactgagacagacaaagaacaccaatgataacaactaaccttttttgaggatttggtataggcactgttttaagcactaaataaattaactaatgtaatcttcagtagaattctattacagagatgtaggtactattatattattatcaatactttgtttgtttatttatttatttattttgagaaagagtctcgctctgtcacctgggctggagtgcagtggctcgatctcagctcactgcaacctccccctctcaggttcaagcgattctgctgcctcagcctccccaagtagctgggactacaggctcacaccaccacaccaggctaatttttgtatttttagtagagatggggtttcgccctgttggccaggctgatcttgaactcctgacctcagaagatccacctgccttggcctcccaaagtgctgggattagaggtgtgagccaccatgcctggcctgttgttactttatagatgtggaaaataagacatcatggttaagtaacttgcccaaggtcacacaggtagagctatcaatagcagactggaaccaatagaggccctcacagaatgattcttgggagatttcagttttcatctgaactttctcagggggatgtaataatgtaaatggactcttggcccctccatcctggaagcttggccaagtggcctaaaccaggggtccccatttagtttctccagcccccttttttcttgctgagttgttttaaaagttaaaaagtgcttagtgaccttggacaacattagcaccttctaagtcctggaatccaccaagaaggaggaagggagatggtgctgaattcccctaaggcagggctcaggaagcaagagaaccctgtggtctaacctttcccatctgctctcttgttcccaggctacgtgcaggcctgccgcgccctgatgattgctgcctcggtcctgggtctgccggccattttactgctgctgactgttcttccctgcatccggatgggccaggagcccggtgtggctaagtacaggcgggcccagctggctggtgttttgctcattctgctgggtaagacagctttctcagtggtaccctacctatgagggagcctgatgaatctcagatcttgtggttgctgccttctcaagttcaagagaaatgtgaaaggaagccaagtgaagccagtgggggatggactcccacaatctgtatccctttgtattttatgggcagtttacacagagggctaagtaatgtctctgggagtcactgaccatgaagataagtttaaaaagagaaagaggattttgaaggtaggaaatacctaagggaaagacctgaaagatggaagccttctcagtcttcacagtggaatcctttttgaacacctatgcccaggtcccacagcagatcaattgaatcagaattttctgggcatcaggccaggcaaagatattttttgaaagcttcccaggtgatgcttatgtgcaggcaagactgagcagctcagttaataaagaaggaggccgaggtgggcggatcacctgaggttggaagttcaagaccagcctggccaacatggtgaaaccccatctctactaaaaatacaaaaattagccaggtatggtggtgcatgcctgtaatcccagctactcggggcgggggttgctaaggcaggagaatgatttgaacccaggaggcagaggttgcggtgagctgagatcacgctactgcgttccatcctgggtgacagagtgcaactccaaaaaaaaaaaaaaagaaaaagaaaaagaaaaaagaaagaaagaaaaaagtaaagaagagggcaagagaaaagtcaggagttgagggtggttagaccaccaggtgatggctccgtcctttaactcagtaagccttccttgagcatgtgggccagacaccatggtaggtactggggacactggggaaaataggccgtctttgctttgagtgtacttggaaacctcaatagaatatggtatgtgctcatgtagaaaaggtatatagtctgtgcatacacataggaaggcacctaacccagactggatgagtttccagagtggaagaacccagcagtaagctctgagacttgaagaggaggtgggctggtcatgaattgaggggagggacagtccagggacaggaaatggcatgtgctcatttggttttgctgattatacctgcacataaagggcttcatttaacaacctatggagggtccttctagctctcttctcgtcagtgatttaatttctctccgtttttttccctcagatgctagtttcattagcacattctaaatcctaatagacaatatgaattttaagaacaactcttgttgcaaagtgcgcatatcagtgacaacaaattagtctggtaatgggttagatataaaatcaccttcttctgaaacaaggaattcatacccccagattggcatatcagatgatgaatttgaggggtaaggataaggggtcagggttctgtgtgggttgatgccacttggtgggtacctcccatctggaggcctcacactcataatgacaccagtaaggtgaggggacatgagaggtggggcaccattttccaggattgcaaagggacggaggtttgcaggttcttgtgaagccacaagggtgtgtgtgtgtgtgtgtgtgtgtgcgcgcgtgtgtgtgtgttaacaggagtgaaaaggccactaatttccagagaaaaatctgaatgtggaaattttggttccagccacaaagaatttgtgtgccagcgtcacacggaacacatatcagcatccggtgctttatctgactcacaggggctccctcttgcagtgctctatggaggtcaggtctattgtctgactccctttccaacaggaaagtgaaagctccacaagtaaacttggtttgcagaatccaggtgaaacccttctcctagacacttgctgtttgttactttcctcacattctcacagaagccccggaaggttctcttgggctctgaggatggcagagccaaaaggtgggtctgttgtgttgagtgctcatgtttagaaattctggccttccatatgaatgtcacaggtatccacaagtgagagaacacactaaaacaaacatacaaaccctggaaaatagagggataaaagcaaagtatacgtagtttaaacaaccctaaaaacaacagaattgtttagttgaataatcagggatattgaaggaaaaagcaaccggtggtttgaaacttcctagctgaatttgtttttctttatcttctaaaagtgtgttgatatagataggcagcatcacagaggaagaaagcaaggtggggctggggagtgggtgagtgcctcagtccctgtttgcctgtctggagtgaaactatgggggaagcaggacatggagggacctgaccccacccaaggaggctgcccatttccggacactcaccagagtcccctcattgcccttttacggccttgcatttccgatattgtctgcctgctttgctcctatccggatttgtttctcagtggatcaccactgcctttgggctggatgttgttttgaccggaacgagctagctctggaaatgtaaagctcattgtctcaagcatggcacctgctgatctcctctaggtcttctcaccacggagccccaagtgccttgtttcccctgttggcagtggtgggaggagcatggggactgaaggctccctttgtgttgctctggactgtttctgtcactcccccagagaagccagcgctaggcctgtgcaaggtcctcagggtcactgaatggggctgaacaaacacacctcattcgaccaaagaagatgaggcacctcctgggtttcgggggcctgggaactggacacagtgtcacagctagtcctggtatgggaactgtgaacactgctaattgaaatcagtttttcctgaccctgaaaatctgtaattatttttgtgaaagcttaaaaaaattatgtctgttgtacaactttatcttctcagcagttacgtttgatggtgtgaggatttggttcctgctgtggaggaagaaataggagccagttgcttctaaagccagatgagtagtacaggagcagcaggctctcagatctgtggtggatttgaggctaatctgtttgtggcttttcaagagtccctgccaaggcaggaggtgcctgtgccctgaattgtgtgatcttatcagctggagtcagatccaactgtgctgaatctggaacctactactttctagctgtgtgaactggggcagttccttaatgtctctggtcccttccataaaatgggaacaataacgcctgcttctcaggttagtaaaaacagtgaaatgatgtgtgaaaattatttagcataggatctggcacatggtaagtgctcaataaatggttgctattattattgttattgttggttagctggttaaaagaatacccagagagcagctgggtattcttccaatcatgtcaatttccttctttttatttttattttttgagacggacctttgctctgtcgcccaggctagagtgcagtggcgcaatcttggctcactgcaacctctgccacctgggttcaagcgattctcctgcctcaggctcccgactagctgggattactggcatgtgccaccatgcccggctaatttttgtattttttgtagagatggggtttcaccatattgggcaggctggtctcgaactcctgagccgtgagccaccgtgcctggccaagaaggtctttaagaacgtttttattttggaaaatatcagacctatataaaagtagaggaatagtataataaacccctgtgaacccaacctcctcaacagtgatcaactcatggctgtaatatatgcttcatctttccacttctccatttcttccagtcttcagatttttaaaaggaaatcttagatagcatatcaagaaagatttttttcgctattactaatgtaagaagtcagaataatttaaatgattttaatgaaaattttgctttgtgctagaaatgatgcttttaaaagttctttcagggctggacgtggtggctcacacctgtaatcacagcactttgggaggctgaggtgggtggatcacctgaggttgggagttcgaaaccagcctgaccaacatggagaaaccctgtctctacttaaaatataaaattagcagggcatggtggcacacgcctgtaatccctgctacttgggaggctgaggcaggagaatcacttgaacccaggaggcagaggttgtggtgagccgagatcgcaccattgcactccagcctgggcaacgagagcaaaaatccatctcaaaaaaacaaaaaacaaaaaaaccaaccaaaactacaaaaattagccaggtgtggcaggtgcctgtaatcccagctacgcaggaggctgaggcacgaggattgcttgaacccatgtggcagagtttgcagtgagctgagatcatgccactgcactccagcctgggcgacagagtgagactgtctcaaaaaaaaaaaaaaaaaagaaaaagtcctttcagtgggaagtgacaaagcttgaaaaaaggttcactggggccaggcatggtggttcacgcctgtaatctagcactttggaaggcagacgcgggcagattgcttgagcccaggagttcgaaaccagcctggccaacatggcaaaaccccatccctactaaaaatacaaaagttaggccagcctggtggtgtgcacctgtgattccagctacttgggaggctgaggattgatgctcgggagaatgagtctgcagtgagtcgagattgcaccactgccctccagcctgggtgacagatatcctatcaaaaaaaaaaaaaaaaagatttattggaaggaggaagaaatgtcagtgtctactgatcttgtctttctctgcctctttgtctgtctgtctgtctctctttctctcagttgttacctccaacgtcaaacatacctgtattgattttatttaacttcatgtttatttaactccatgtgttaccatgtgtcatctcatctttaaagagattaaaagccacacttacatttcattgctttaaaatggacttctcaaatattttctgtttggtcacatcaccatcattcttagtttttaacaaggcatatcttatcaattaaagaatgtattgtgttgcattatttgaaacttgttctcaaaaggggcaaacaattttattctttgaagagcaaggaattctgcttatgagaggaccaggtttagatatatctgtctttacatagtgaagctttcttttcccttccctttctctcccttctcttcccccttctcctccttctcatttttagctaagaatatacctcagttttactttctgttttccaacaacaaatggtaccccccaccaccttgtgtagttagctgttgcatcttctgaaggtaaaaaaggagaaaaactgaaaaatctgagtgctaaaattactctgtcttgtttttagagacttaatttaaaaataaactctgatgatataaaaagaaaaagaacaaaaattccctttgtctgtcttcaattttcttgaccttacaggtaactgactttctagaaaaacactttctttatttttcccaaataacagagagaaccattccaaactcatctttttgggtttgcgaataaaattaaaactatcaggccttctgtgtctttaagaaaggcaattatttttggccagttatattactatttcacatttttaaaagttaagtaatgatttgtcttgaatttttaactttactggtcaaaacatatctctttctctcttgaaaccattgctgaaattgagtaaattctccttttttagtttttaaacatttctcattttgggttcaattgaaggtcactgttttcagtgagcctctcatttcctttcatgttgtgtggcagtctgtcattttttagtggttttgatgtggttcatctttgagagccacaggaattccacccagggttcatttgtctcctaggaagtaaagagcctgctggcactcatttgccttgttttgtgtgaattgtaagagaaggaaatctttaatgaggtcagtgatgagcttgcgactttaagtgtgttaaagtcacaataagattttatgactttgggtgtcagttttggtatgtatgaagtaaaatgtagaattgaaatgagactacttctcatctatccatccattcgttcccccgttcactcatccattcctatggaggttcattgtatgaaatatttagacctttttctgatttttccctttttctaatgatttatattggaataaaacctaacaaaatccctaaaatactcaaaaccaagactgatggttacttttgggatattgagtctgttatttccctgtgtgaagataatcttgttttatgatttgcttaagggaacaatgaaatgaatttagaggcagtttcttgtcttattctataaaatctcagtgtgaaagttaggttaacaatagatgtggggaatgctttcctgcatgtgtgtgcacatgtgctgtatgtgtaaatacaaagtatagttgaaaaatataaaacttgatttgaaccctgagttgttttgaaaccagttaattgtttataggaaagatcggttagattgaaccatatcagttgtttgggaattagaacttttttctctacagaattcagcttttcactccccttctttttcctctaaacaagcctgggtgtttggaagcctttgctaggttgctgttttttgcccacagcagaacgaatgcccacttttgaggtttagggctgtgtaagtagattgtgtattgctacggaaaatctacagtagttctctctggctgaaacactccagaagaggattttagtcccttttgctgacagagaaaaaggtttttctctgtgtcttgctgaaagtagagactctgataatagccaagcaattctccaagagtgcctgatttggagttcacgccagagaagagaaagaaaaagactttcccctgcatctgaggtttccaaagtcctgagctagaaagggaggtttcacgtacacactgcttttcttgaacattctagtcacagaaggaaaatacatcttctcatggtatctcatatgaaaatattacagaagctggcatgactgtgcttactttttaagaaaaaggaagcattagcatatggatagattttagcttcttctttttctctttttttttttttgacacagaatcttgctttgttgcccaggctggagtgcagtggcaagatctccgctcactgcatgcaacctctgccttctgggttcaagcaattctccctgcctcagcctcctgagtagctgggattacagtcacccaccatccatgcctggctaatttttgtatttttttgtagagatggggttttgccatgttggccaggctgatcttgaactcctgacctcaggtgattcgcccaccttggcctcccaaagtgctgggattaaaggtgtgagccaccatgcctggccaattttagcttcttagataatctataaataattaatggagtgaatttgggctgttagaaagccaatctgggcaattcatagcttttcaaattaactctcttccttctgatttcctcttgagatctattctttttaaggatagaaatcatatcttcctacatatatctatacccagcttgtgggggtgggcttaatctattgtcaataaaaatctatgttacaagcaacacaaatgcgatgagattgtttaaaaggtctttcaaaatgggtaagaccaatcttttttccatttagaactaatatacaaggctgttagatttgattgcttatgttaagttatatttcttctctgtgggcatagagagtaagttagaaaatcacttactatgagtagaaatcagaaaaaagcttgctgagttgaaagtgataacggtacccctggtggcaaacatcagactggcagtgcagtatctgtcttgaatttgttgatggaaacctcattgttattattattgttattattatttttctgtctgccaactttaatgtgccatctcaacttaaagaggtttggagttactttgtttagagctgtgttgttcggtacagtagccactagctacatgtggccatttaaattaaaattaatgaaaattcaaaattcagttcttcatctcactagcctcatggcaaatgatcaatggtcccacataacttgtggccactccatttgacagtgctggtctagagatttgaaaaaagtaaaaaaaagtctttatagcctcttgcctgcccatgttttgttactttgcttataaagaggtgaaaaactacatgatatataagctatttcttattttactctataaaatcaaaaccaaaatgaagattagattgattggtgcaagaccataagtaaagttctaccattttgacccttgaatgggtgagtttttctactccaaggactgttcatttgtgtgttgggattttgtgattgtgaacagtgtaataaaaacttgaacctttatctggtactccgttttcatctagcaacattcaccacagcaagagaaatttcataccttctccagatctttgtaatgtgaattgaccaaactgagaaaatagagtggaaaattgaggtggctgccatcttgtttctcatatttgaatagctcagatcattcagccattcaactggtctacattgagcacatactatttgccttgtaccaaggtagacataggtaagacatggaccctaccttcaaagaactcagagcttagaatgatgcatagacatgtaaaggggtaattataatacaattaagtaagaatactaattttagaattataactgtagatatgaagtgttgatatacaagtaaatacaaataaatattttttggacttaaatggtttatttctaggtttttacactggaattgttttgtctctgttacctgctgaaaaaaataaggacccagcagtctacttcttctacagatgccaactgctacatattggttcagtgttgagggagcagaactgtgtgtatggagctttttggagctggttggaagccacaagtgtgtgtatgtggagtgagtgggcctgcccaagtgcttggtgtgtgatggttgcgcccagtcaccgcctctccatgtctctccagctctctgcgcccttgttgccaccatctggttccctgtgtgcgcccaccgtgagaccaccatcgtgagctttggctactccctgtatgcaggctggattggtgctgtgctgtgcctcgtgggtggctgtgtcatcctctgctgcgctggagatgcccaggcctttggtgaaaaccgtttctactacactgcgggctctagctccccgactcatgcgaagagtgcccacgtataagagggctgcccggctgcccacagaggtgctgtagatgctgggcccagggccctaggtttgctcgtcacagtgtggggaagcccattcctctgccaggctctaaagccaaaggtctagaaaagcatcctgtctggcattttgtagtcttaacttctccccatttcccccatcttttggttgccttaaaagaaatctctagctcagataatgcccagacatttttttcccttggtgttgcccctattagctcttttcttgggcattcttttgctgtttattaaaaatatattatatatattttgtttctttaaatttcaaatgttttgcaaacatcactgagttaggtgggggtggggaagagaaatacaagatacttttttttttttttttttttttttttttttaaatagggcctcactctgttgctcaggctggagtgcggtggtgtgatctcggctcatgtagcctcaacctccccggctcaagtgatcctcctgcctcagcctcccaagtagctgggactacaggcgttcactactacacccagctaatttttaagttttttatagagatgagggctccctatgttgcccaggttggtctcgaactcctggactcaaagtatcctcccgcctcggcctcccaaagtgttgggattataggagtgagccaccacaccggccaagatgcttttcaaactgatacagatgacaatgggagcctcataaagatggcttttgtttcttcccttcaaggtcatttacttgtacgagacagaaaaagatagcattggggacatgggatgggggagggagggcaatagtggaacgaactttccatgggaaactttcccttttgtaagttgagggccaggggtagggatattttttagtttgtgattttacatttatctgtacatactttttcaagattgatcatttttataaccatggttttcctgaaatcctcaattcatcaatatgaaggaaatgaaccacatagactttatgcaataaataacagtgcaagtgagtataactctaactgatgttccacaaaacatttttgatttcaggtttgtatgatgtagtttttaatcgtacattttcatatgcttcaaactaacacatttttaaagctttcccccacttttctctctatttgtattgttagccatcttgaagtgatgttgtttaacataaattgtactgttgaatttggctttacgggtgtaaacactgatggtatatcagtatctgagaccccaaactctccaaatactgatggtgcattttattcttgaagtgaaatctgtgcaataaaataacagactgtctgcaaaactggccttcaatcttctgttgtatccagaggtatcattattgatttaaaaaaatctcattaatctctactggtaatttatagggaatctgatcagtgattcaagaacaagtaattctgcattgccttgaataattaaaaagttatattttattcacggtattgcagtggtaatttgtggtcatgaaagcataacctcagtgctctctaggtttcttaagtggggtgactttatggcatctttaatcatcgatcaatgggcagcaatcagaaacaaagttctcagcattatgcagttaatgtccttcatctacttctaacacttagtaaaggaattgattggctaggtataaaaagagaattaacgaaacctattttattggatctttaagtaataatatctaaatacatttcgttcaaacatacatatgtagctgtttggacattttggacaaagacacattgagttgatttttatttgtttttctgttccagaaacttcatcaagttacgggcctggtctaagaaaacacattgcaatctattttggcagacttctttcaaataaaatactaatttcattagctgatagtatagtaattggcaaacatttcctctttggaaataccaatttgggctagccattttgcagaaatttgtgtagttttgattataacctgttggagagcatttctaaattacttatacataaaagataatcttttttttgtttgtttttttgagaagaagtctcggtctgttgcccaggctggagagcagtggtgcgatctcggctctctgcaacctccgccccttgggttcaagcgattcttgtgcctcagcctcccaagtagctgggactacaggtatgtgccaccacacctggctaatttttgtatttttagtggagacagggttttgccatgttggccggggtggtctggaactcctggcttcaagtgatcctcctgcatcagccttccgaagtgttggaattataggcgtgagccaccgtgcctggccatagaagacaatttttatgttaactaaaatatttgcttagctattataatatagcttttgtaaggataaaagtcatgtgactacattggaggactctccctacctcattaaaagttgtcaaggtataacgattatgaaccagaagggagcaaaaagcgtttgagggagtggacgaggaggcttcagaccccatgatccctttcctcacaaccaccagcttgtgtcagaagtgtcattaagtgggtctcctctcttatggatgtattgactcgcccgctccttccctgagctgctgcttgttttctctcataagggggctgctgcatgagctccacttttcccttccgtgtaagaagagagactcccaaatcgctcctagctgaccattccctgactaatgagggaatcccaatttggaggtcataactctagtgttaggtttagtatcagtttgatggaggagaggttgatgtgcctctagaacagtactgtccactaggaatacgatgtgagctgtttaaaattttccagtagccacatttcaaaagctaaaaataaacaagtgaaattaatttattttatttgatccagtacatccaaaatattatcatttcaatatgtaatcaattgatgagatatttcacgcccttgtttttgtattgtctttggaagagcgtgtattttacacttgcagcacatttccatttacaccagccacatttcaagtgttcagtagccacatgtggctggaggcttttggattggacagcacaactgtggaacaacaggttctgtctcagtaaccatcgagaggatcagtcttgattatcttatctgctgtcattagagtcccctgagaacttggcaattacaatttattgaagaattttaataaatcttcacctaggtgaagacaatgacctccaatcacgtgtaaaatggcaggcttaaagtactctgcgtaagtaacatggcaaagggaatttacgctgttgagacctgtatgtgttaggaacgtcatacatttaatcctccccatggtccccattttatagatgaggaaaatagtatgtggagagtttaagttgtcaagatcatatagccactatataaacaaaaagggatttaagactatgtgactctaaagcccgagttgtccaatttaagaatcatggctagggccgggcgcagtggcccacacctgtaatcctagcactttgggaggccaagtggggcaggttgcctgagctcaggagttcgagaccagcctgggcaacacggtgaaaccccgtctatactaaagtacagaagaaattagctgggtgtggcagcttgcacctgtagtcccagctactcgggaggctgaggcagaagaattgcttgaacctgggaggcggaggttgcagtgagccgagatcacgccagcgtactccagcctgggcgacagagcaagactccgtctcttcaaaaaaaaaaaaaaaaaagaaaaagaaaaaggaaaaaaaaaaagaatcatggctaggtaataaagtaaactggagattcactctcttcattagggtgggagccaagaatgtgcattgttgttgtgtatcctcagtgattcttataaggtggtccccacactacactttgagaaacagcaaataaaaggacttctttctcatgcctttctgtaagtgcggctcatgtcctccctggtctcttgtttgatggtcactggagatgagatgattttgagaatcgcaccatgctttactctctctctttagcctgttctgaagagaccacatgcaggggatttttgatttgaaaatgaaacagtctggctcatgttttccaagaatttgatagaaaccaaattagagagaaaagaatgtttcaaggcaatctctgaatctaaggatgttagttacaatgacagtaataaaaaagagaagattgtgtgcttaaagaatacaagttacatatttgtgctgaattggtggtttgggttaacaatagaacaaggtttagttgtatcttgccctgttttttttttttttttttaaattaaaaagaaatctgcgtgtcagtgtttctctatacaatgtacacaatgtgaactgcaacatcttaaatgtttggcaggacattcatgctcatgacatcacatgctgagaggacagggaggccagtgtggggctggcctcgaagagaggcggcatcagtgctaccattgagatgtccccacaaaagagtgtgtgacagccagatgtgcagcttaatggagactgaaccaggattgtgggtggaacattggcacatgctgcttatggcttgaatagcagctcttgaggaatctatatttctctacctcatgcagaatcttagagctctggctttgtggctccatggctgggggagggagtggagacggaggaacttgtcactgctccatgccccattgttgaaatggaaaatgtggaaatgttaagccgtttctagaggattgtggaaggtaagaattgcttccaaatataaaaatacaaatacaaaagatcacctgatcgtcacagttgggggctttcttgaataaaaatggttatatctctatttctcttatgttgaattctatagctatgcttttcaaactgtagtgttgatacggatcacttggggatcttgttaaaatgcagattccgattcagcaagtgtgtgatagggcctgaggtttggcatttctgaccagctctcgggggacgctgaagctgatggtcccagactcacaccctgagtgcacagactctggagtctgcctcctgcggaagcacagacgggctttgtgcatagacatggtgactggcgcctgtttttgtggaagacactgggagtggttctttgcccttcaaaataattctggagcctcactggccaataattctggtgtagaatcattcttttgacttcaaggttttgttccttatttaaatataaacacccagtggtactcttgagctaagtactggctcattcacattttcaggaagtttgcaagccagttgatgtcacgttgggagcttgatagcagccatggtgggagggtcattccacagaaatcaccaaacactgcaaatcaggcatttctctcccagctccaccttccggccagttgctaaacatttaccaggccaccactgctcagctcttggagaacaatacattaagctatatcagtccttgtcactgtaattgggaaaggctctattcctccccttcctgagaagaagtttcgatgagggaaggtgggtagagctgggagcacatgaggtgactgaggggaaagagatgtgccagctgcagtctcttggagctgtgtgtgcactggtctccttgtcctgagtctgagggtcttggtggcctggcagagaaagggctgcttcctcaccttttagtctggttcctaggcttggagagcagtcggtaaaaccggcttatatatcaaataccatggctaccaggttggtgcatagggccatcctgtcctcttttgaactcatatacttggggcgtcactcatctgacttctagaagtttcctggcagatttagttttgaaaggtcacttttttttcctgattgtaatagtaataataatataatgactcatgtttattgaaagcttattctttgccagacacagtcctagtattttatatatactgacacatttaatctcacaacaacccttatgaattaggggctattgatattttcattttacaaagaaggaaattaagacaaaggtgatttcaaactggcttaaatcacacaactattgagtaatgtacatttacagaaaatttgaacactgtggaaaaatacaaaattaaataaaaaatcacccatcatttcatcattaatttcttttgtatatatgtttagccatcattttattttaaaataaaaactctaacatactctacatataaatttgttcctgctttaaaaaaatacatacattttcttgtgtcattaagtggtttttctatgaaaagatctttaatatctgcataatattctattgtttggatgtactaacaatctacataatctactcaatgaattccgaagaatgtcttagttgttttggtttcttttaaatttcttctaagtaattttgccatgaacatccttataggcaaatttttgcacatatccatgatgatctttttaaagataaattcctagaaaggagttgctggatcctatattccaagtagtgttttaaaaacaggtttctttttttctttttggtaggagggtgcctagtttctccagcactaataatagaatgcagtttatcaatttaatatgctgttcttttataattatttgaaatattcatttttttcagttttgttgatgtggagttatataaacaaatacttttgataaatagctaattcaaacatttcaaaattattgatggaagagaatgtatgcaaatgggatgctggaggactgaagttctgccctatattatagtcctgctttagctgaccaatgtccaccgggagtggagtgtttgtcttcaggagactttgtgtgtgggacactctgattccagtagcccctgtttagggtgggaagctctgggagaattgtaggctgaaccattatttttatttgttcccagcatagtatctcaaacataatctactgagaccaaaacaaggcaaggtaaaaatgaattactttctcttttcccaagccttctagacgttaatcttgtgcttatgatggaaagaaaatttacctggcttcatttgctgtctgattttgcttattactgtttcaacaaaaggtcggggaaaatgcacatcaaggagagcttctagaggtgtgaggggcccaggactgttggggatgagagcctctgcaccgcagggcagccgagggccttgggccgttctcttggttttgaagtagcctccatgagcaaggagagccttcccctcacacagttaggaaacaccactcattcatcctagtccacagggtggacctgggggtgcagctcttcccttcaattcggggttatgagagacccctctttcctcaccatggcctttctcaaaccagaacaaagctcagatttgcctcagtcatggagtatctaagcaagatcttgagtcatttcattcattatttctaaaatgtggtatggggatcatcagcatatggctcattcagtaaaatggagatacatgggctctactccagatgaatggagtagggatgcgccctgggaatcggcattttacatgactctccaggtgattgaggtgctctctaaagtttgagaaccattgaaaaaggtccaatgaatatgggcattggaacagaccattgcagaaagatgagtcatatgaaggaactgggagccagaaaagtaaagggatttccccaagggtgtattgccagggtgttatttcctattacctagggctctaaaatgaagggattgtagtgttggggagctgctccttttttgaactagccattccatcagaatgagagctgcctttatcttttttggcccatccttctggttttggggtgagagcctaattcaggctgggccaatcacagtacatcactgacctgagataactgggatcagcccaggagggcagcttttcatctaaattggaccagccagagcccattctttattggagccatgggatacagcacatttctctgatagcaaaaccggaaagatgtgagtctagaagctcttagcagccgtcattccagctgtgtggaaagagtgagtctgggaaaatgaggccaaaatgcagagagaagtggaggccaaagaacagagaatttcatgatatatggggggcttgattccatagtttctgaggccagcttcataaaagccctttggttacataaaccaacacccccaccaattcctttacttttcctatttgggttttgtcaattgcaaccaaaagaattctgacttggcagagactctagtcttgatagatattcctacaaagtccaagtccgtttttccgtcttcctttggaggatttcaccttttctttcaccagccatgtgttctgaatgggaccatggccttcttcctttgccagaacgttaggtccagaagatgggtgtgtgacccaagtcaggccaatcaagttctctcctggaacttttcaaactgcagttgtgagaggacaccatttttctccatttagaagagcttgcagtatccatggtgtccataagtcttgtgaagaagcttatctgtaggaagggagaggaagcagaaatgagagatggggagcagggagcccaacaatgttgaggtgtctcattctaggtgaccctggaggagacagcgacatggtttttggtcaaagcaagtatgaagtgagtcactgtcactttcaatcaaaaaagtccacgtggatagcgggcttcctgaaccaattggcttagaccttaagcctgaggaggtctcatatgtgggctgctgcttgtaaatttatgcaaggaaaaagggtgaggttttatcactaacatttatcctgacttaaacccacagacaccttcctcacccacctccaccacacctctactccccccgcacctctattccctatactagctggctaaatcagagttcaggaaaaaagcaaccacctgaggatttcagagggaatttaatacagggaattggttgtagataatggaacagcagagaagtcaagcagaatgatgaggtaactcatagctggaagccactaacaggggatgaagaggcaataggaggaggctgtgactagaacccagaggctagggccacctagggggagctgggaccatggtgggactgcctcttgagggctaagaccacagagggaaggggccttgtaggatctgggaccagggaggtgactcagtccctgctaaatacatcaccgaagcagagcaaaagagggaaaaataccgcggtttctccccttctcctgccctccagtcatctgcctgtgcctctcttaggttgacctacccagtcagaagtccagggagcctgggaaatgtagactgaggatgggccagacaatggctctcagagcacatgcatagttaagcctgaatatggcagaaatagatcaaggattagggagcctcaaaatctggaagctgctcagacctcatggggcagggtgagggccactctctgagtgcctgccagtaaatacttcacaaatgagttctgggcttgcttaggacatcgattcaaaaccgattcccaaatctaccttccccgttggaactggtcatgctttggtagcacatagaaggtcctacaatactactgctcaggttcagggatgactttgcttctcttcctctgcttgctccttggaacccaagccagatcctggttctgaactacctactttcccattgatgctaccgtgatcgtgcactctggagcttctcccctctccattcttgctgtctctgtatctcctcaagaccgcaccatctccttcctggatgcctcctgtctctcctccttcgagtctagcttcccctttgtcaatatcaagatctcaacaggtgcttccctggcttgtcatcctttgagttccccctttccccgcttctcaaaatgcaactgccttagcttggcatgcaaggcccttcagaaaccttcctggcctttattaaaaatattcacataagggtctttgattatgagcaagagaaacagactctggatagatgaaacaaaagagggattttttgggggggagggggagtttggaaaacagggttttgggggaagaaaatttagtttttcagaaaaaccaaactcagggaagggcaagcaaaaagtagacagttttgcaagggttctgttgctaggatgaaggaactccagctgtgttcagtctttttgtcacttggtttaagattaaaataccagaaggtagcatctgattggcttagaaaagtcatgtgcctgcccctgagccaatcactgtatgtagctagggaaattgggccaggcctaggtcctatgctccatatatatttttttccctgggggttggtgggggtgaaaaagaggagggtttccccaaagaaattaaggtgcttaggggacatgaaaggatccaaggtgttaccttggatgtgttcatgtgttcatgtgttcatgtctattacatttaccaatatcccaaagtatgattcaatcattcttattgtctcctccctgccccttgccccataatctcatcaagatggtctttgggagagaatcaatcatcactaaacaagagactctttataagaacaatatcctggagaattaattattgtaaattttgagctctttccctaaaactatttatattttcagtaaatctaaaaagcttttattaatgaaaaatctcccctcattctgccttctgttcagaatggaacagaattctgaataagcaggccttcagggtatgaggctagatacataattcatggctgcactgtgttttcacatctgggcttccttagagcttattgatattttattaagactgaaacatttttgtattatttaaaaattcacaaactcttaaaactttatcttaaaatgagttttatgagtgtctgctaaaatcatattatttattcattcattcatttgttaattggttaactaatcacgcaaacatttaatgagcacttgttatgtgccagccatgcattagccaccagatataaaaaggaagcacagagacagtaccaggctcaaataactcagagtctagtggcaaagtcaggcatgtcatgaataataatgatattagtttattatcattgtcatctttaatgtactttgaaaagttacacctgaaatgatttaattttttttttttagacagggtctcactctgttgctcaggctgcaatgcagtggcgtgatcttggcttatggaaacctccgccttctgggctcaaatgattctcgtgcctccacctcctgagtagctgggattacaggcgtgagccaccacaccaggctaatttttgtggttttagtagagaggaggttttgcaatgttggccaggctggtctcaagctcctggcctcaagtgatccactcatctccccctccccaagtgctgggattacaggcatgagccaccatgcccggccctggctgagaggggaaaataaaataccaacggacgcgcatcattgcacagattaaatataagaggctaaagaatattggatgtggccaggcgtggtggcacgtgcctgtaatcccagcactttgggagcccgaggcaggcggatcatgaggtcaggagatcgagaccatcctggccaacatggtgaaacctgtctctcctaaaaatacaaaaattggctgggcttggtggtgcgtgcctgtaatcccagctactcgggaggctgaggcaggagactctcttgaaccagggagtcagaagttgcagtgaggtgagatggtgccacggcattccagcctggcaacagagcgagactccgtctcaaaaaaaaaaaaatttgatgtataaatgcatattgacttcaactacgtcttcccccaaggttgtaccttttttgtgggcgtggaaagtcagccaattctgaaacttcctaaagtttattgacttaattatgagcaaaaacagtgagatactggcagagaagtgccatcttcaggtttctgtgggatgtcctgctgagacctgtggaggagcatgctgtttcttcttagagctggaacttagttgaaggcatcactcttttgcttgtcagaataattaaaaaactctccaggtgtcggagctcagcttctactgtgtcaagtgcagcaaaaacgtagctgacttagttgccactggcatgtacataaaatgcacggccaggtagtttagcagagcagagtggagaatcgaagcaatgatcctcatgcatatgttacacatattttctctgcttccttgcatgctccattgtcccatcagacttcacttaaaaaataccagttcaggccaggcacggtggctcatgcctgtaatcccagcactttgggaggccgaggtgggtggatcacctgaggtcaggagttcgaggccagcctgggccaacatggtgaaaccccatctctactaaaaatacaaaaattagcctggcgtagtggtgcgtgcctgtaatcccagctacttgggaggctgaggcaggagaatcacttgaacctgggaggcggaggttgcagtgagccgagttcttgcagttgcactccagcctgggtgacagagaaagactctgtccccctcaccaaaaaaacaaaacaccagttcaatgaccaaattattaagaatttcaagatgttgacagccgagcattaaaccaagtgctgggtccttctgcttgcagggcctgtaagatcgcacaggttgcatgtccatgaagccggtcctggcctttattctatcaggctgggagcctaggtaaaattttgattaagtctgtaagaataagacaatagatcttgggggaaacttgtagcctaagtcacactttctaacaattctataaggaaggtatcatctcctttttccatgttaagagactgggcttcagggagatgaggtaacgagccaagattacagagctagcaagtatcaaggtcaatatttgaacccatatcttctaaagttaaggccagttctcttactgctgcggtatgcttagcgtttatgaaatgaaactgaattatgtttaataaaatacagtgagatgagaatgtaaaaaacacacatctttctcataggatattaaagaaacacaattttatttaaaacaataacgatacaacacacatgtattaattaacttaattattgcaacagtcccatgagttagaggctgttaacatactcattttatagatgagaaaacagaggcatggagaagttaagtaaattgcctaaggttccacagccaggattataaactttgcggtctgaatgtaaagcctgaggtagtaaccgctactctagccttcaagtgcaacttactccctaagaaagtggaatgaggcgtggtagcgggcgcctgtagtcccagctactccagaggctgaggccggagaatggcgtgaacccgggaggcggagcttgcagtgagccgagatcgcgccactgcactccagtctgggcgacagagtgagactccgtctcaaaaaaaaaaaaaaaaaaaaaagtggattgaaggccagagatgcagtggctcatgcctgtaatcccagcactttgggaggctgaggtaggaggatttcttgagcccaggagttcaagactagcctgggcaacatggagaaaccctgtctctagaaaaaatatgaagattagcctggcgtgttggcgcacacctatagtctcagctacccaggagtctgaggtgggaggattgcttgagcctgggaggtcaaggctgcaacagtgagccttgatggcaccactgcactccacccagggtgacagaatgagactctgttaaaaaaaaaaaaaaaaaaagagaatggaaagccttttttttcttcagttttagagttttattccattaaatgggaaaagttcattgcttaatgtatattttaactaccttagactattgttctaatttttgaaattagaataaaaataaaattttactcttgaaagagacttcattcacttatttatttatttttttaaggacaaaaaaccaaacaccgcatgttctcactcatgagtgggaattgaacaatgagaacacatggacacaagaaggggaacatcacacaccggggcctgttggggggttgggggaggggggagggatagctctaggagatatacctaatgctaaatgacgagttaatgggtgcagcacaccaacatggcacatgtatacatatgtaacaaacctgcaccttgtgcacatgtaccctaaaacttaaagtataattaaaaataaaaaaataaaaaaggagagccattttaataaaaggacagtttcagacttagtataagattttttgggccaggagcagtggctcacatctgtaatcccagcacttcgggaggctgaggcaggtggatcacttgaggtcaggagttcgagaccaacttgaccaacatggtgaaatccagtctctactaaaaatacaaaaaattagccgggcgtagttgtgggtgcctgtaatcccagctacttgggaggctgaggcaggagaatcacttgaacctggggggcgaatgttgcagtgagccaagatcatgccactgcactacagccttggcgacagagccagactgtctcaaaaaaagaaagaaagaaaaaaaaagggccgggcacggtggctcacacctgtaatcccagcactttgggaggccgcggtgggtggatcacctgaggtcaggagtggagatcagcctggccaatgtggcaaaaccccgtctctactaaaaatacaaaaagtagctgagtgtggtggtgcatgcctgtgatcccagctacttgggaggcagagacaggaggatcccttgaaccgggaggcagaagttgcagtgatccaagattgtgccactgcactccagcctggatgacagagtgagactccatctcaaaaaaaagattttttaacacaaatactttcccagttaaaaatgttagtttaggggtagggttaaattatagacctgttggtttttcaaaacagattttcttagaaaataatcctttgtctgtagtcaattggaaaataaaaggaactcaagcttctctatggtataggggctcttggatatttgtatctctggaaagaggaaatatagactcatattctctaccacgtcacaaacagattttcaggaaataaggggaattctctatggaaggaaataaactctctcgtaggccttgaggtcctaattaatgacagggatgtatgcagaaagtaaaggcacacacaaatactttttggtaggtgtggttcactgggggcagcacttgttagcaagtcccagtgttgttaaggcaagggaatggacagtgttcaggctatagatttggttggcaaacgaaatgccaaaacgagtgggtatgctctgttttcagcaaagaaatcactgggctggaaaaccctcaaaatatcaatcatacaacaagacctctttaggaaaacaatattaggatttttgcacatagcccttttgaagttaaccagttttggcttaaaacttgaaaataaaacaagagtgcacactagatcaagaggtctttttaagccacttttgatcctggaagacccctagagagaagacagagccttggtattgttaaaaaaaaaattggcctcaggatggaaaagaaagagagccaggattctgatttctcagtcctgtactttccctccaagggagggtgctgggccaagctgtggctgggaggccatcaaagactccttctgtgtattaagatttggaatttatttctgatgtcatgataaggacaaaagaatcttgcactgtgtcaggctggggtagctgctgtgctcctgatggggagaaggattgggtaagtgtcctcctggagggccacctccaaagccaggcgttgtctccggaacaaatccaactttcacttcgtagcctgttagagagtttttccccatgaatacctctgaaccctccttgaaccccataatgtttcagctagcaatgtcacttgaagttaacaagttccatatgtttgcccccaccacagtgaaagttgtttttccttttatttcttctccaattgtctcctgtccctttgccccatccatagttcatttggttgccatcaaatttgctctcctcgtctcattaggtcattaaatgaattccagcacctgaaaagagcagtttttaagattcaagttttgctgaagaattgaggtaaaatattttgtgggcaactgaagatatgggtacagcaataagtgcattagcttcacgtgcatccgccttctaacctgttaagcggaaacaaaagttccacgggatgcgtgagaagaaaacaaaacatgtttcaatctcattttcaaacactaaattgctatataatgataagtgataaaaatgcctctaatttccatctattttttttttcaataaccagctgggcattttttagaaacttagaattcatcctattatgaattcaaattagtgtgttcttaggaaagatactagaatgtgcctttgttctgtcaaatgaatttattttttaatgatcagatcttgagagtttgctagaaaatgccactaaacttcaagatataattcttctctaatatactttcttatatggatagataattccacatttttgtcttttaaccagtggtgtagcttaaatattaggccaccgaaatttttagagaggatttctctctgtttgattattataaaaaaacagaccatggcctcccaacagtttctttttctcttcccgtccccccctttttatatctttcttcacattttatgtataggactcatgccattttttatatctatactattagatcttataagaagattctcattctgcaaacttttattaactacctcctctggcaataaatgtccatacttatgtttatttaattgtataaagatgtgcagctgtaataatgtatcatgtacagcataaaatgtacacaaaaagttaaataataggaaaaaatgaaataacattttaattttatttcatattatttattaatgatacaagcttttttcttttttgttagtaatattttagtgagatcaatatttgaacctacttcattatttaatatttgggataaaaacattcaaaggtctgattcttagttcagttaattttattacttggtttcagtggctgctttagctgaaaaaaaaatcttatatggatacatagaaccatacagcagaaacacataatcatatcgttataccctgcgtcaaagggtataatgcaaagatttatattaaacattttgcaaagatttacattaaaatttggcagtagtttctccattttccttgatgcctttcagttgttcttgcaagctaatcagaatatgttgcatttctttttcttttcttttcttttttctttttttttttttttttgagatggagtctcactctatcacccaggctggagtgcaatggtgcaatcttggttcgctgcagcctccacctcccaggttgcagcaattctcctgccttagcctaccaggtagctgggattacaggcacacgcaaccacgcccagctactttttttcagtagagacggggtttcaccatgttggccaggctggtctcaaattccagacctcagatgatctccctgccttggcctcccaaagtgctaggattacaggtgtgagccactgcacccggctgcatttttgtatttctaaaaaatggcttgaaagcccatggagactcttgatttgtaagattacttaaccacgtttaaaaattctaaattttctgtatctatgataggactatttttatggatgacacataatattttcattaataagataatatacctgtccaaatatctttgttcaaaatggtctctccatagaactcatttcatttgaaaagcaattaaaagcaattgctttctcatgagttcacggattatttctcataaaatcacagattaacagtgcttatttttattttatttatttatttatttttttggagacagagtctcactctgttgcccaggctgaagtgcaatggcacgatctcagctcattgcaatctctgcctctggggttcaagcgattctcctgcctccacctcataagtagctgagattacaggcgccctgcaccacacctggctaattttttatgtttagtagggatggggtttcaccacgttggccaggctggtctcaaactcttgacctcaggtgatccacctgcctcgtcctcccaatgtgctgggattacaggcgtgagccactgtgcccagccttattttgttttgaaattcttgttacatggcaaacttttgtatttttggctccactgttttcactgcaatggctattttatggtatctttgcaggaatcttttaaaatgactagttgttttttatggggttagtttagaagaaacaaataatgcaatgtaaacgtctacttaaatgggcatttataatctaacaactatcatatctcaaatgaagagtgatggtggcactgcccacctctcttcattgatgaggatcctttatcctcgggagcacctgatgacccgcatggtcatcagaccacagaaggatgctctgatgaatacgtgattccatctaaatccatagtaaactccatgatacaatacaatacgatacaaattaggccttacatattaaatatgaggcttaatttttcttaatcctgagattaaaaacattttagaaaattaaataatattttcttttttgtatctttttggaggcttctgatccacaggggaagagagagagagacatataaaccaataactgtattcaacatgtaaaatgctatgtacatgaaaaaaagactgctatgggaacttgtgggggaggaagggagacagagggcaaattccagaaagtcaaagagaggagatacttttgagacgaagttgaagaataaatgggagtatgctgaaccaacaagtgggccaaggacattcaagaagacacaagaaaagagagtgtgctcaggaaacactgaggagctggttgaggtcaggatataagatgcctgggggaggggcagccatgaacctggagagctgggtgtgatgcggctgtgaggggctttgctctgttggcagtagggagccactgaagattttaaggggaaaaatgaccttagtgaaggatatatttcatttacaaatcatgaaccatatacacattttatacataattacatttttggcagatgtggataaaattctgttcgatctgatttaacaaataattattggccattatggcaagcggtatccccagatttggtggaacaattaagctgaatatttacagtgaaatacacagatgtatgcatttgtcctttaaaattgtaattttctggaaatctttgacatctggaacaaattcacactaatatttagtccttaacaatatatatgtttggggtttatgttgtagcactatgttatgaataaggcagtgttatgacattcttcagagatcaatgacatctaagttcaaggctgacctatagatatggtattctatgctatcatgaaggtgaccatatttccagaacccccatacacttttcttcctaactgagaatttatatgtatgaaatgattaaatcatacttacatcctgaaagaaacaaaacaaaaccaatatgtatgtaggccagacatccaagctaatgaactctgagtgtgacttccttctgctgatggaatataagcatcctaaacctatatatgccatgtagagagagtggcctgtgtatgatgtggccttgagaggctagcttctattatttgtgtcattgtttggaaaaaggtgccaggatgccttcttggtttgtcagtgagaacatgacaaatatttgaaaaggcccttctgtcataagaaataaagattatttttatttctgattagaaaagtaaaatatgctttgaagaacagctagagaaaacaaaaaagtatgaaaaagaaaatgcaaaaccaccccaaatcagaatttttagaggtaacaatcattaacactttatataatcttcttccaaatatttttctatgctatataacatacacacttattcaaaactaaatatatactaaatatacattttgcatcctacttttacaatttaacataattgccattccttatgtcattaaacattctttgaaaacttgtttttagatggctatacagtattgagttttatagatacaccataattaatttaaacaatttctagtttggggcattaagtcgatttcaattttttttttggtatttttttcccctgtagttacagataaatacatctggtgatttattttcttaggatcattttctaaaagtgattaaaggatctgaattctttcagatagaactgttgaatatttaaacagagtgattgaaattgttctctgcttttggcgggagcatagcgagggtatctggatgatgagggaaaacttaactcctttttttttttttttttgagacacagtttcgctcttgttaccccaggctggagtgcaatggcgctatcccagctgactgcaatctccgcctccctggttcaagcgattctcctggctcagcctcctgagtagctgggattataggcgtccgccaccacgcctggctagttttcgtatttttagtagagacgaggtttcaccatgttggccaggctggtctcgaagtcactcaagttatctgccctcctcggcctcccaaagtgctgggattacaggtgtgagccactgcacccggccggaaaacttaacttgtatgtattcactccttcaggaaatatttattgagtgcctcttgtgccccaggctccgcactaggtgccagcgtgcagcaggaagcaggagagcacgttcactgccctcctggcttgcctgcatttacatagacagcaatggcgatcctggtctctctaagtccgagcctctttgctccacccccccgcccccccaccgccatctctcccctcagagtggtccttggggatttcacttcagggcaggtttatggtgtcttccagtccttgttgtatttagcgctatcttggggaaaagttgtgaagtatgtctttgggaccctggcctctcccttctgtacttgagtccccttaattccctctcaggcacccagggacctcagaatattttttctcatggcttgtgaagacctgctttctcagaaggaactgatgatgtcagtcgttcatatctcaacgtgggtgaattaagacgctgtgttccttcttccagggggagttaactgtgaaggcacttaacaatctccttattgaggaacgcgggactttgtttccaatggaggaatttctggcatcagagagcagatagggcagaggtgctttcttctgcggctcctcaaggctcacagcttgctatggaagcatccttggaggacatctccttccctgccctttccatcaacgttggttaatccaatctccaccttctcttaaaagattgacatgacgagtgaggaagccaaggacattgcatccgcatcttaaacttaatctcagtacatgaaaggggctgctttggaaatagagcttcatgaaacagggaaatcccgtggccaggaaacccctcgctcctccccaccccaccctgtgaggagtgtctccactaggaaggaaattaaatcagtcttccagccaccagaattgaattgggatggactatttcctctttggattatgttccaaattgcattcctgttgctctgtttgaagttagagtcagaaatcattcgtatttcccctctctgaaggaaagcctgctgcaatgcttatctcatcgagttaattgacctacaaagggctcattccttcctaaaaacactctgcatggctctgatgggtaagcatcaggctaacacatatatataataaaagttcgaaaagtttgaatttttaggttttagaaatgggagcatgtggttttctctctgagcctcagagctgggtgttttttctgccctggatttgattgaggctgatgagagcatggaagggcctaccctcaggtggggaaagaggaggaatttgagaatttggcacagaaagggctctctttgccagtcagcgaactgttgatagctgggaataaaatgtggaagaactgtttggcttatgaagatctcctaaatttctaatcaagtatttattattttttaaaatttcaacttttattttagatacaggggtccatgtgcagctttgttacatggggttattgcgtgatgctgtggtttggagtatgggttccatcacccaggtagtgagcatagcacccaataggtagttctttccccaaccccaagtagtccacagtgtctgttgttcccatatttatatccatgaatgctcagtgtttagctcccacttataaatgagaacatgtggtatttggttttctgttcctatgttaattttttttaagattatggcctccagctgcatccatgctgctgcaaaagacatgatttcattcttttttacagctgcatagtattccatggtatatctgtaccacattttccttatacaatctaccattgatagggcacctgggttgattctatgtctgtgctattatgaatggtgcagtgatgaatgtacaagttcgtgtgtctttttggcagaaggtagaacaattattttttttgggtatatacccagtaatgggattgctgggtcaaatggtagctctgttttttttttttttttttttttttttttgagatggagtctcgctgtgttgctcaggttggagtgtagtggtgtgatctcggctcactgcaacctctacttcctaggctcaagtgactctcctgcctcagcctcccaagttgctaggattacagatgtgcgctagcacatctggctaatttttgtatttttagagatgggatttcaccatgttggccaggctgttcttgaactcctgacctcaagtgatccacccatctcagcctcccaaacagctgggattacaggagtgagccactgtgcccggcctgttttaagttctttgagaaatctccagactgctttttacagtggctggactaatttatattcccacgaacagtgtgtaagtgttcctttttgtctgcaacctttccagtatctgttgttttttgcctttttaaaaaggcactttgactggtgtgagatggtatctcactgtggttttgctttgcatttctctgatcattagtgatgctgagcattttttcatatgtttgttggccacttgtatgtcttcttttgagaaatgtctgtttatatcctttgcccattttttaatggggttatttgttttctgcttgttggtttgtttaagttccctataggttctggatgttagacctttgctggatgcataatttgtgaaagtatttgatttttttttttgagtcttgctctgttgcccaggctggagtgcagtggcaagatcatggcttactgcagccttgagcaccaaggctcaaacaatcctcccacctcagcctcccgaatagctgggactacaggcatccgccaccacacctggctcattttcatatttttttgtacagatggggttgtcatgttgcctaggctggtcaagggatccacccacctcagcctcctgagtagctgggtttacaggcatgcaccaccatgcccagctaatttttgtattttttgtagaaactgggtttcctcatgtttcccaggctgatcttgaactcctgggttcaagcaatctccctgcctcacccttccaaagtgctgggattataggtgtgagttaccgagcttggctgattggcttatttcactcagcatgttttcaaagttcatccatgttatagcatatggcagaatgtcattcctttttaagctgaatattccattgtatgtataggtcatattttgcttatccattcactcattggtggacagttgggttgttttcatgttttagctattgtgaatagtgttgttatgaacatgggtgtacaaatatccttggaaatgctgcttccaattcttttagatatatacacagaactgggattgctggattatgtggtaattatacattgaattttttgaggaactgccacactgtttcttttttgtttgtttttgttttgttttgagacagagtctcactctgttgctcaggctggggttcagtggcacaatctcagctccctgcagcctcaaactcttgagttcaagcaatcctcccacctcagccttccaagtagctgggattacaagtgtgtgccaccacgtctggctaatttttgtatttttagtagagacggggtttcaccatgttgggaaggctggtctcaaactcctgacctcaagtgatctgcccgccccagcctcccaaagtgctgggaatactggcgtgagccaccgcgcccggccatggaactgccatactgtttttcataaagtttatacccttttacgttcccatcagtacacaagggttctaattttttcacatcctccccaatacttgttattgaataaccttttaattttaagacccatgtaataaggttgtagtttggaatattaatccaattatttttgatcctggtaatccctacttctaaattgtcctatgactcctcttggatactatttgtagtctcttctgtggttaaaaaaaaaaaaaagggcaatcctttcaccagttatgaggctattgtccccaggaggacatatgtaagataatatgtagagggagtccttgtcagaaggaaaaaagagtggaaacccagcccctgctggtcctgatggatggtggacaggggaagaaaaatagaggtagaatagaggggatgaaatgcttgtccaggctttccctcctctgtgggtggaggtatggtaggagtgagaaagcctgaaaacattgtgtgttgggggtaatggtatacgtacttggaagggatataagcagtgatctgctggtaaatgtgtacagccatttctctgagagagaaaaacagttctgattttgtagcattttccaattcccatggtgtaaatccttccactacggctgatttcaagcttccaatgtgaattcactaaacatagagttgaggaagagatgtgcaatagctcatcattatgtagtatttctgccatgcagatataataattgtaaataacctcgagagcataggtaacagtaaaacatagtaaaatagctttgagtatttattgcctttgttttcaatgtaattaatttatttgtaagtttatagaactcaagttttaataatgttgtatttagcaactgactcacaaaagttgtaagttaccaatcattttcatgagcaagctgcagcatgtcattggctccaattctcaatgagcagagctcaggaatgaatgtgtattattagtgaaggaagtggctggatactcgagtctaacgtggtgattctgatttcccaagactcagggtgacaagaagtggattctaaagtgctgagggctcagtgggccagcccaggcctggagtctgaatgaagaggcatcagtgtgccggaacttcatgactgggttcagtgccagacctgcagacgttgaaagtgaatgtcatcatgaagcccacatggctggatgggtcaggttctcctcagttgtcacctgtccaggggcagtccaggtagctattctgcaggagctaaggggtccagagtaccctagttctcatttgcacccctctccttatgagatcacagaagctctgtttccagaagtaatttggagagaagcaaggggaagggaggaaatccaaaagactgagcatttatcccaaatggactcaaccatctaaaaacagcaaatggaaatcaactgggattccgtcataccttaatacatttaagacatgattacacaatacatttatatataaaacattaatatatttatggattgtttttcttcccctgctatcgaggcaggtggaccattgcaagggagatcagggagttgcaggaaataaagatatggcagtttctttgcatcccatgtgatatggaaaatatgtggccctgctacaccctctacctttttctccaggtatcaccacctgcgccatcaacaagtaagatcaattaagccaccatcaatgctatggtaatttggtttgggactgtaggcagatactgttcttctaattgttctttaaaataaatgggggcaatgaactgaatgttctgtattagacataagatggtgcagagggtgtggggggctgcagcttgagtaggactgcaccgggagaggggtaattaatgaggcagtgtagtgagcagggtccctgagagagccctgtacccttgttagaagaacgtgagagggagacagcgccaggtcaggttcttctgagagcccactaaagtggaactttcatgttctcctcatggaagtaaagtaaatttaaaggggtaggatggcactgactttcttcaaatttaaattttattagtcgattagctgtactttttaaaatgttttattctgaaaatgaattttccacaataatgcaattcaaagtgaactcatttatctggcttttctacaaaggacaattgaaacacttaaggcgaaattcacttattcatctccatttaagaatggaaaaaaagtaacagacttcagatactggttaaggttaacaaaatatgggaaggctcctttttcttttctttctttttttttggtagtctcgtgtaaaagctttacattactatggatattttatagtaagacacttttgtttctgactttctttataaacccatttttaaatttaaaggcacacaataaagctttatgcatttattaaaatatacacattttgttaaatttagaattttcccttagtatcttgataaatcaatatattgtcaacaccacacatttgaaaataaaacacatttcataatacatctgcatattatttctttcttcatgatacactacattgtacagcacaccaatgggaattaaaaaccacaaaacgaacaaactttaacaaatacagcaatttcataccaaaaaaagatagcagagaacaacactaggaattaccatctgtaaatgcaagttgtacttctcaaggacgaaacgaaaaagaaacaagttagtaaaatttacaagctgtatttataactttggatattaattaaacagtaacgtttcttttccacagtgagaaaagctagaatgtggagtcctgtcatcagatgatgtgactacatggaatgaggactatagctgctctcttaaaaacctgcagccccctctctcagcccagacagttgaggtatttatgcaccatcataacattaacagcatctttgctttggaaagtgggggtttatgatttctagggtaaatcctcgcctttgggagtgtgaatgagacaagcgtatcagcaactgccaagaccaatcaatagatgtgcatggaacattctcttcatccccaaatcagaatgaacacagtcctttaaagtctgcactgcaggtgaaattcacatgactcacaattccctttagccaatgttaccgaagtcagtgtcaagaaaacttaacagaaaaaaaaaaaagcacagagtgagttcctaccataaaaatccaggctgcccctgtttcctagctctaatataagccattttctttccttatgtgtaccaacatgtactaaatgtcccaaagagtaagaaattagaactacctgttgtccgaagaccttaagcccaaagctatctgtgaaagtcctatagggattttgtaattctgtgtgtgcagaacacagttaaattattattattattatttttgagacggagttttgctcttattgcccaggctggagtgcaatggtgtgatctcgactcactgcaacctctgcctcccgggttcaagcgattctcctgcctcagcctccctaatagctgggattacaggcatgcaacaccacacctggctaattttgtatttttagtagagatggggtttctccatgttggtcaggctggtcttgaactcctggcctcaggtgatccacccgcctcggcctcccaaagtgctgggattacaggcatgagccactgcgcccggcccagtttaatgattttgtacactgttttagttgatactgcagaacacatattcacctttgatgggctacaaaacttccactcaccccttgtgggttctaagtcctaaaaaaaagaacactctattttcttagagaagtaattttggcaaaaggcgactgcctagctgtttcagaatgatttcagaatgatgcctgcattactcaagcaggacaagaagaggaaagcattttaaaaaggaagttgctcttaaggagaaaaaaaaattaaaacagcctttcttctaaaactcttagagaaaataaaagtaggacataggaccaaccattatgtacatgaaaggggctttttgctacccatccccattcccagcgagaaatactaagtaaactccttggtgaaacttcagctttctggttcctgcgtgtggtggggcctgcggtttgggatgctgtttctgcacttgctcactgttgaatttcaaatactctttcgtggccaggccaccactggttacctgctggtgcctctctctcttaggatctccagaggtctttgcagacacgtgggtcctcagtttcagggagctacacaggtacaggggaagcagaggctccatgaagactttggatagaaacatcttccttgacacgtcttgttccaaacagcatgaaaatggagcgctggcacacagccctcgtggcgacttctggatgtgtttcctttgctctcctctctttccctccattggaagttagggacacctctgcactactcactgacctgaggtttatactccaatagtggacccctacccgctgcgtagactccgtaagcagacccccgctctggcttcagacacatttcctgagttctgacttttccacacaataagacattctaatctgagattcataattaggtaaacctgtgtttggccctccgcggactttcctctgacatcttgggcccctggtaaaacctagtgcgaaaggggacggcaattttctccagtcttctatgtggattttcaacctgatgtagcttctgtttatgttgcagataagaggtggtttcttgtaaggtagacttccaacaaatgttggatgtctaacaaatgttggatttgtcttccaataaaagaaaggatgtcaggtttaccaacccttttcagcagaatagaggagagagatttctttgaaggagtttgtgttttgtttttcaataattactagatttatattctggctgacctatagattctgaagaaggatggattgttaaattcaacaactcccttccgcccgccatttatttaaacagatttatcatgaccattatgtaggcatttgattagctactagtttgttactaagaagtagaactggcacacgcctataatcccagctgcttgggaggctgaggcaggagaatagcttgaacccgggaggtgaaggttgcagtgagccaagatcatgccactgcactccagcctgggtgacagaatgagactctgtctaaaaaaaaaaaagtagcactcaagctcagtaaaacctggagctgagattttactgtttagattagatagatataaaaagttgttaggtttagttgttgaaacctattgttgaaaactttaaagtggctgttaaattgtgttgcttgtccacgtattaaatggctgtattttcttaggttaatgatgaatgcagacacaggactcaaagtacagctatttttctctttaatttgttaaatcaatttggagtgtatatgtggcttgttagttccttgcataggtaaggaagccaccgtctcagctttcttaaagttcagccttcctggattcacactttcgtcagttccccaattatttcccactctctcacccgaggaaagccagtcagctcagtgtgacattcaagtctctctgtgagtgatccctcacctgccttcctagcattatttcttattgttgcatgtataagtcatgcataaatcatgtgctccaggcaaactagctccttgctttctcttaatggaggcacagcacaaattcttagccagaggaccacaaactagtagaccttattcatgccgatcctttgcttggcatgcctttctctcatttctacttgataaaattctacccacttcacaagttccaacacaagtgtgacattctttatgacctttccagaggaagaaggccttcttcatatttgaccccccacagcacattacaagtccgtcatctcacctgacacattcactattgttctttatttatatatcccatttcccctatttgattttcctttttaagagacagggtattcttctgttacccaggctggagtacagtggtgtgatcatagctcactgcagccttgaactcctgggctcaagtgatcctcctccctcagtctctcaactatctgggatcataggcacatgccaccacaccaagctctatttcctctacttcttaagagctggatttttatctgacttacgatatcaatatctgccatagtacataataggcactccacaagtaattgttgaataaatatttcattttcctccaattcattcattctgtcaatcatcaggtatttcttgaatacacactatatgccaggcacatgtagctagcaaaatctaggtttgaagcttacctgtggattttaatgatctatgctatttcaaacctctacctgcatggggaaagatttgttcttatcatgcagaagtacttcttcttgtcattaccactaattctattatttttcatggtgtcactcattggcaaatttagtaaagcatgtcagggttctgcatttatgtactaaatatacgtctagttttgtcttatcctttctgtttctatttttgtttgctctgagttcctcacttaatttttgttttgtattatatatattttagtagctgcctcaaatccttttgaaatgaagcagagtaccaataaataagtagaataaaatctgaagaaaatcaagtaattggctccaaaccacaaatccacacaatgaaatctcactcggagagcttttgctattcagaattcaataaaatgtaggtcttccttggactcccttcaaggggcaaagtttctaagataattataaggtgatcttacttttaatgtgatcccacacatacatcgtttagaaacctgttaagaaaatagtaatattgtcattgtagtgattgatggtatttgaaaactgcattgtaaaatctgggactgttcacagaagcaggtaaacctgaggacaaacatgtctatgtacctgaaaatactttttctatcttagtgattttttttttaaaactaaggttgctagggaggtgatttatcaactttagaaaaataaagggagctaagcttaaaatatactaatatactatgtgggaaaaatggctcctgaaatgagagtgcttaatagaatctgcatgaagtcaacagcaatggtgttaaccaaagcatacattttccattcccatcctatagaaattgcattcatctgccaccaggctattgttactttaatacttaaacctcactagtaaaaggaagctctttcacccacgttaagattttgccattttgcactcctatttctctattctcatgcttaatgaatacaacccctcctcatctatctagatatgtatcaagcttaacagattctatttacaccaggcagatttgttgagtcctatagccaattcaaaactttgttttcaaaagatgactgataattagtttataattaattcctaatgctgtatttcacagagtaggcactgtatctttatggttaactctagggaagagaaaacatagcattgtcaagcatgatattaaaatgacaaaatgacctcaggaaaccagagttctaaacaatgactacagaagaataaaaaatatctagaaaattgcagttattttagtttaatggtatacattggctatgattacgatatgtaatttatttaaagcatattttttaaaaactagtttcaattcatctttatatgtatgttaaaacccagtgcatcagcctggagacttgtcaagtttgttgttttatctgcatttaccaggctccagtgctgctcatccatggactgtagcccccaagggcaagtgccatgcttctattcattcctgtcacttagcattgggtctattctcaaccagtgttagttgaatgaaaaaatggacttttacctccttgccataatcctaaagcatgccaagatggcatgagcctcagcctttcagaaagaacagacttgagtgctagcgaatatgttctggaaaacgtttggcatactgatacatccaggagagaaaggacaaggaatttcttcttttgtccctctttcaggaaatcctcacagagattttattaatagcttgattaattttaatagcttggttaattctatgatagcttgattcaaattgtgccttcacatacatttgtacgtatctcagtgcagccacaggaattcttgtaacccaagagtagaatttatattgtagcccatgtgtgtttttttcctttgcaaattctctcatctattctatttctgagaaaattcttttaatagccccttttatggcccaaatttacatcttaccaggtagatatttctctgggcttcagtgaaactactctgggaaataacaggaaaaaaaaatacacctctgaaagtgagctagccccaaggaataaggttcagaagtgaaatgtgatctcatggaatgcaactacctaagtcgctatacttcagcctattttgttttcagagtagcacacaccaatcaagtggttgcctatctcaaaaactttagaatttataattttagaaatatgaaagagaatttgcaatgtgatctcagtggctggctcacttctccttgtaaaaatttttatctgattataaaacaaacaacctactttttcaaggcatatcagtgccatgaaatcatgctccacctttgcccgctttcatcatatcaccaggagctgcagtctgatataagagaggccatgacagagagttaatttctgccaatgcccttctggcttttaccgcaagatatggttatttaattttcttctgggcatttacatagagctttgatggtgcttcttaccatatcactgggtctgcctgactgctttatggtgaatctgaaaccattgggaaaatggtccagagtccctgaactttgctggatcctaaaattatagtttggaagctgtgagaatgttggtgaataaaaagaagcatgtgtcttttccatgaattaattttgggtgagattgcaggataaaatgatgcttgctcaggaagtgccaatgcccatctacccaccctgacctcggggagcagcactcagcctgacatgccaagaacagagctttgtccccatgtctcaggtgactgaaattctgccttctgcccagagcccctgcttgggcttcaaccagcaaagcaaaggcctaggaaacatttggtaccatcagctctggtggttgcacctaagatggaatttcatatagcctcttgtttatttatttattttatttaacaaggcgaccagttaggggacccaggttaagcccttcaacagaactatcctgaagagcaaaagtagcaaatgacaggctatgactagggattgaatttggggaaggctggatttgtgaaatgagagccaaaaaagttttcaccttctagcccacaggttaagttactgaaaatcagtcatcaccatttctacccacttgtgtgtttctcctactctggagagtaatctaactcatcatttgcaatcagggcctctgagttctgtttgtgtttgcttttgctcttcgctttgctacttgtccggccgtttgccttcgcatctgacatctgttggtaatagaagcctttgtcttcagtgggcccgccccagtcctcctggctctcgccctctgtggcgtaggagaaaccctcctccactgagaaggggtcatccacgtcgtagcgttggtacgtgctttggtgcagggcctcttctcgagcgctgatttccagggtgctgttccagatgccatatccaaaataaatgagcagacctgtggggcgaggggaaaggtacaggtgaataagcaattgctttgggatcctgggactagcagagagatcaccttcagtgatgaaatcaaagctggcggggtggggggcggtgggggcggggatgtattttctttgctttatgtggtgttttgaaaatacttgaattagatgccttttaaaaattgggagatcttgcgttaagtaacccatatttacagattttcctagaaaagtcaaaaggtctgacaacactgcatccacatttctacatggtgatttttggctggtgttgagaactggctgcctctttagacaggatacagggtctctaggttacctcagtccccacctcccatgctgacgtcgggctcattacactcatatagctgccagccaggaatttgcattttctaccctgggtgaactatttatggatcagcaacagtttattcccaacgttcttataagatttgattattctctgcctccagttagggactctatctcatgtttcacctcttagcagcatgcatatattatcctgtgatttaccttgacattttacactcactaaaggcgtgatatatcatggccactccaagctgcctgctttcttctgtgtgctctcagagtgtctagtgcatgctactattatgtcccttagaacatctgttgtgtgattatctgcacagggtcgtagactctgcagaaaattggcacttaatgtttgttgaatgaatgggtgagaactcctgataagcgtgaaatgtccagtgcaacctctgtgttgatgtcatcccaatcaaaggaaagaaacttgcccccctcgttaatatgtagcattcatatatgctaatgtttcatttctatgatttaaaaaacatgcataaaagtcatttatgagtacccattttctttttcttttctttttttttttgagacagggtctcactctgttgtccaggctggagtgcagtggcatgatctcggctcactgcagtctctgcctcatgggctcaagcgattctcctgccttggcctctcgagtagttgggaccacaggcatgtgccaccacgcccagctaatttttgtatttttgagagatggagtttcaccatgttgcccaggctggtctcaaattcttggactcaagtgatccgcctgcttccacttcccaatgtgttgggattacaggcatgagccatcagtcctggcctgagtccccattttctatcttgaatagactgtgaaggttcagggcctggaagtctgggaaccataaccttggagtccatagaacatgataagtaagactgtgggctctgtgttcaaatcctgccttcatcactgttagctgtgtaaccctggtcccattacttagcctctctgttcctcagcattctctgtaaaacgatgagagctatagcaaccctcttaacatgggagtgcttgaggatgaaatgaggtaagtggtggttctcaaccctggctgcacttgaaagtcacctgggggtgttttttgaaccactctgataccctagccccatcctggagattctgatttaattagtctgcagtataacccaagcataggtatgtttttaaaactccacaggtgattccaatggtcagagtgtccctgagataatgaactgtgcctgatgggcacagtgttccactgcccactcagcccacactatggcctaggcactggggtccatacagtatgcaacctccttcccgggccctaacatcctcctctgagtagcaccagtctctttgactttgctaaccctgcaggcttctgctgggctggtttgcttagaaccgcaagtcaagcctgctttgctgctgtggtgcttgagaaatcttgctctcttttgaatttgaagtgtgcctttttaagcttggatttctccctccttgtctcaaatgactttgtcccccctccctcccacactccccagtgaaatcaactttccaggagccaaagtaagcacagatttatagtcctaattggtaataaatcctagagttaattatttgcagatgtagctattagtgctcaaataatgattcatcttttaaaagcagggtatttactctttcttttctgtaggtggggggtggctatgggggatggttattatccttgtgtagaacagggcatcacattaaggcctcttctaagagtgccagtgtgctggttcttggagaatgcctctgtctgaagcatgtttggcatctgagaatggatttcaggcgaccaggcaggacctgtgcacacctccttttgcactgctttgcttttttgccatcttttcttctagacacccaggcagatgccaaatattgcctcctactcctgcttggtacctattatgccaattctttcctttctgatgcccttctctgactttgcttatagacgactcatttccctactgaacttaataccatctttttcttttccctttgccccaaacgtctctcctctgccaccacaaaggtcattgttcagtcactggtttgacatcactcatcactggtttgtcgattccaacagacctgtccctgcccccacaaggtattttgggtgtcagatagattcatattatgggaattctctaaaaaccttgagtcatagatatttagagctggaaaagatgctatagatcacctatgcattctaaaaccttcattttacagaagaagaaacagaggctgggaaagaataagtgacttgcctgggtctgagaaggagaggaaccagctttatacatggagggagagaagtctcttgcgtgtctagtccttcacacctcctctcccctcccccaggctggtttacagactatgcccactgcagtaaacatgtgataagaggtttacatgtgttctttgggagtggccaggcctggaaggaacatgtgtgtgtgtgtgtgtgtgtgtgtgtgtgtatgtgtgtgtgtctgtgtctgcgcgctctcacatattgactgtggttactttttactttgtgaagacaatccatggaaacttgccacataaatatttatgggtcttttcatgtttgccctgaaccccctggagtttcaaaggtgtatcactctgtcttcaaaaatgcatttcaaatgtgagtactgtgaaacaagaaacgaccgtgtgcatgcagcctggtagagtaaatagtagatgcaaagccgttcccctagggcttggcattctgtgtgtctatctttcttgctggcccttgagtcaattcaggaaaagtggtgtgaaactgagaaggattggagaaaagaaaaatggagggggacaaagaaacagagaggaacagatgaagggagggagggagggagagagagagaagagaagagaaacgtattaccatctgtcccacataaacaagggctttgtgtcggaggagtaaacagagctgctccacgcctcctgtgtggaagcagggtgttttgtttctgctcctttttttagttggcttagagaatgaagcatgaggtagtttctgaaaaatctgtaggggttctgggaatcctgaatcatctaaactaaacttcacaaagcatttctgtgtgctgggttaggataatgatggatggttgatgttgcacctttgtcccaaagagctcaaaatgttacacaaacagtatcttgttttgtttagactccctttaacctgtctgggaaggggtgtgtgtgtgtgtgtgtgtgtgtgtgtgtgagtgattatgtgcattgcacacttcacagacaggacaacaggacagtgggcacagaaaacataagggaaggtccacagccacacagtgagcaggtggacagtgaatccttccaggtctccccatgccctaatccagggcgcttctatccctcttacatctcccgcctaccagggatggaaaacaatttggcttaacgttttatttggaagaacatatacaaaagtggagtgaataggatcatgaatcaccagctcccttcatgctccctcccctgaccccttctctacagattgttttgaaacaaatcccttctatcataggtttaatttgtaaatatttgagtatgcatctctaaaaaaagcagtatcatcacaactaaaaattaataataatttcttaatattatctgatatccagcagtattaaaatttatctaaattattacatgtgtgtggaaaactcttcaccttatgaggctacacacgtattcctatgatgccatcattgcttgaagtagtttttgggcaccgctaatcaagatggtcactgggaacggcatcatatacttttgtaaactcttgcggagggcaatctaatatcttttgagggtggatttgattttgctataagccagaagtcatttgaaaccaagcctcaagaataagatggctgattcacaaataatactatttattctatttggatatttaattctgctgtaccttaaaagcagataacttagagccattgctttgtagttacataacttatgtcagtaagaaactaaaggcaggtgtgatggcaaaaatcagagggtgtcagcctttgtgctgcagcagtgtcctggaggctcctctgtggggctggaattattttttttgagttgatgggtcatggtgggggtgcgtggtgtgtgcaggaaagtgactagttagcagtaaacacagaagtgtttcaatattctggctgggcacggtggctcatgcctgtaatcccagcactttgggaggccgagacaggtggatcacctgaggtcaggagttcgagtccagcctggccaacatggtgaaaccccgtctactaaaaaaaaaaaaataattagctgggcacggtggcgggcactggtaatccagctacatgggaggctgaggcaggagaactgcttgaacccaggaggtggaggttgcagtgagctgagatcacgccattgcactccagcctgggcgacagagtgagactccatctcaaaaaaaaaaaagtttcaatattttaacacagacatggttggactggggcacgtgggctgcatgcctgtcctggtcaaaggtaatggtggttagtcttatgaaagtctgtttaaaggccgggcacggtggctcacgcctgtaatcccagcactttgggaggcggaggtgggtggatcacgaggtcaggagatcgagaccatcctcgctaacacggtgaaaccccgtctctactaaaaaatacaaaaaaattagccgggcatggcggtgggcacctgtagtcccagctactccggaggctgaggcaggagaatggcgtgaacctgggaggcagagcttgcattgagctgagattgtgccactgcactccagcctgggtgacagagtgaagactccgtctcaaaaaaaaaaaaaaagaaagtctgtttgcagtgacgggaaatattcaaagggaggctttggcttcttttctagacagaagttccccagtggaaaatgtgtctatgagaagttcaggctagacaagatcaagaatcatgcctttagcaattgaatgggctttctttatgatattaaatactttgtggttgtaatgcactttatatattaaaaaaagcactttctcatccatcatcccagggaagttaagaactgtgtgataaatcagtaattgaaatagcattgggactcatatctcttaactctaacctgagggctgttcctgtcccacccaggtgcctccagggaaggtttacaaaagctaagcttgcgttcatatactagggtaccttggcatcagcaggtgacatacctgctcacccccctgtgtttatccatcctgtgaaaattaagcaaatgaccccaaacctacaagaaagagaggtgggaaagggaggtcttgatcatacaggagaaatcctagaacaaaaactcaactctgaagagactgagtaatgcaaacaataacagcatatttccaactctgagggcacacacttaggttgcagaccaggtcccctatctccagagttcctgggaactccctgtcctctccatgaagctccatacttagaaccgagagaggtgggccacctgacctcaggctgggtggagctgcctcttgctggggtgcactttccagcaggaagctctgcccactgcagatagctgaggcactttgttatgcctagagggcttttattttgactactctgggatcaactttccaaaacagacatttgccgaagcagaaagggagactgggtggtaatgagaaggtatccttcccacccccacctcaaccccaccaactcccactattgctgattattttttaaaataccaccacgactctgttgactataataacaacaaggcttgtttaatatggtatggccaggaagagcaggcttaggatgaagttgggcggagattctctccatgaccctgcagctgatctaatgggaagtcatgctactttatgtctcagtttctcatctgcaaaacggggttggggatgcttattttatttgcagtatataatggccatgagaagtaatgcaatcttgttaaagaatatgaaaaaacctggtagtctgagccagcaattctaactcaacagaaacccaagagatacatgtccgcgtgtccaccaaaaacatgtacaagaatgttcacagcagctctgtttgtaacagccctcaactagaaacaacccaaatgtccctggacactagaatgaataatatattgtggtatattaacacagtgggagactagacagccacaagaacaaacaaactgaaactacaagcaacaatgggcgtgaatctcacaaacataatattgagggaaagaaggcaaacatcccctctgttgtggcttgaattctgttccaggtaagctgcgcatgccagctctgtgccctccacctcttcattctttgggatcacaggagagccagtgtctcagctgccactgattgcaaagccctgtgagtgctccgcccgctctgcatctggcagtgcacctctgccagcagacagcctcacgattgcatgatccaccttcacactctaccttcaccctccctccttggaatcccaccagccctgttgccaacctcatcctggccttcaggattattcttgctcgtctgagcacaattttgacattggaagagcccgtttttttttcctctgcctccaaggagaatttcaagcttatttatgggacatgtcatcaagaatttagttatcaggtcccaattcattgctctttctttccctcttcttctttttctcacctggctgctttgggtcaatttccagttggatttcagataatagctcaggtatagaccatgaggtgtgtcttctctttgggatatttctattttgagataggattcatgaggtccattgcccgtatcacaagtcctgtcctctaaatctacagacaagaatttgatttcctcagaaagactgaaaaaattcctacatggcaaatcctatggtaagggcaagctattctaacaggtggttacattataataaaaacccgcagggaacagcaggcccgaaggatgccctggaagataccatggtgcagcattctcactgagcccctgctagttccatgttccctgagactctgcccaaccccttgagaggttctttcacaaaactgcatcaactaaaaggaaaatgaaggctgctttgtgctcactttactgggattaatacacatttggtgtttgtattccttttcttgtctgaaggaaaagaaacatgtgctggataatcttgttggggcttgtgcctcgttttactctctgagttgtgttcttctgaaggtcaaaagcttagcaaaacattgttacaaaaatgccgcaattaagatttatttagaaaagcttggataaaaaaatgtgtcttaagaagtttatcaagttatgactcagcctaatcatgtaaatcttcagtttcataagcagctccatttaaaaatatctctactgttttcccccagaaagttacactatgtatagacagattaagaaaaatctgatatcttggaggctcagaagttcagaggtgacatatttatcttataagaccattaaggattttatagccagtttgggattgtgggttggatatattttatatatgcaaaaaatagtttttgaaaaacaagtctttgtaattaaattgtctgccctgcttgataaaactatgctccccttagagcagtggcacgcatttgagtcagctggagggcttgttaaaccctaaattgctctcagagattctgattcagtagacctggggtggagttcaaaaatcacatttcttttttttttgagacagagtcttgctctgttgcccaggctggagtgcagtggcataatcttggctcactgtaacctccgcctccagggttcaagagattctcctgcctcagtctcccgagtagctgggattacaggtgcccgccaccacgcctggctaatttttgtatttttagtagagacggagtttcaccatgttggccaggctggtctcgaattcctgacctcaggtgatctgcccaccttggcctcccaaagtgctgggattacaggcatgagccaccacgcccagcctcaaaatcacatttctaactagttccccgatgacattgatgctgctggtctggggtcacacattgaggaccattgatctagatcattgtcaacttggctgcctattaaaattacctgggaacttaaaaaatattcctcaatactcggccaccagaccaattgaatcagaaaatctctgttgtggaagcctgggcttagaatgtttcagaagcaacccagggtgatactgatgtgtagctagggttgagaatctttgttctgggtgaaacttagtcatatagcagccttcaaaaatcatgatactaaagcagttagcagcaggtgcccagaaatactagcagtccttcccaaatgtgatttgcgggctgtgcatcagaatcaccgggtgcttgttgaactgcagacttctgtgccctctggctggccagccccactctgcagggtggcattcttttgagtcagcgagtagcagtttctggagggagtttggagtttgtgctatcagcaagattacaaaaggcgctcagggagttttcctctgcctgatagctggaagggcagcctgagtcgctgcaggttcacatcgtgctttggcatatgatagccagtctgtccatacttgtggacaatgaatcatttcagatttttaaaagaaaggcaggaaatacatgtttcttgttgcttttctcaacattttctcatttaagccccaaagaataaccaggtcaaggctgataaaattatctgcatttttacagataagtaaactgaggcccaaagaagttaagtaaatttcccaaagtcacaagacaaaggaggggcagagctgtgatttgaagttggtgctgtttgactccaaaggtaagggcccctgccacctgactgtttttgcaaaatgcctctggtgcttcaggagccataaatattctgcagaactggctatagagttttcaatgtaaaatgaaaacatgggtcctctcgttcagaaattattaagaattcaagatggcagcagcagagcattaaaccaagcatgggaccctgtgcacagctgtgtgcccatgaggccagccctgatgctatgtgttaggctctatcgaacgttctaatgaaatgagtctgctcagaggcaccctggtggggtagtaggagccccagatttgagcatgggtatactgagttttagtaatagctctttgaataacttcctgttgactttgagcatgttatttaacttcttggaggttcagtttagtcatccattaaatggagagagggagaagtgggaaggtggtggactacatctgtatttctccaattccagttagttatataccacatttttagtatataaccatttaggctataaccatggcctctggccccacactccctgagttctaatcttggctctgctatattctagctatgtgacctcaggcaagtgcctcagtttcctcatctgtaaaatagagattgctgtgaggattacataaataagtaagtgaagccctcagaataatggctgatatgtgataagcacggtacaagtgctcattattactattcctatgaatcatacggtatctgtactagtagtactaatgttttttctttaatatgactcacactttaaatttaaaaaagtcatctatagtctctttccaagtaatagtatttgtgaaatcaccagattcatgtgtatgtgtggtttttctaacccaggtgaaaatgtacaataactgtacaatatttttaaaagttcattcatatgctttctaataccagttgaaaatattaccaatggaatgggcaccacactgtgggtagcattgtactagacactgaaggcccttttcagctttaatagtctatgaataaataagtctatgtatatttgtgtctgtgtcttgaataatttgacaaatacatgactgaaatatttctacccacttccatcacttctatccagagtagaatctgcattggctagctacatgttccagtggaaaaatgtttagagataagagattgtatttttttaaaaagttttaaaatattaatttttttaaaaaaattttttgaaatggagtcttgctctgtctcccaggctagagtgcagtggtgtgatctcagctcactgcaacctccatttcctgggttcaagcaattttcctgtctcatcctcccaagtagctgggattacaggcacttgccaccacgcctggctaatttttgcattttttatagagatggggttttgccatgtaggccaggctagtctcgaactcctaaactcaggtgatctgccctcctcggcctcccaaagtgctgggattatagacgtgagccactatgcccagccaagagattgtaaatgtgttataaaaattggttaaaatcttgatgagtcagtggggtcctctcaagaaatcctcctgaagtctaaccagggggacttagaatagtgaaaaattgggacaaaatgcttacaggaagccatagagcagccttcagaagcaaggagtcaggcctctggggaagacatatgccctttccattggttgctactttttcccccacttctttctatctatatcttaacttatagggccactttgtattctaccccctccaagttttttctggcaattctgactggaagttttcctttttcccctttgaagagtactttataataatttaagaagtatttttgagcacatactgcgggcaccctgctccagacacggaggacacatgttgaacaagtgtattcctgatctctaggagtggatgcactgccactcatcactaagagtctctgtgggctgggcacagtggctcatgcctgtaatcccagcactttgggaggctgaggtgggcagatcatgaggttgagagttcgagaacagcctggccaacatggtgaaaccctatctctactaaaaacacaaaaattagcagggcatggtggcactcacctgtaatatcagctactcaggaggctgaggcaggagaattgcttgaacctggttggcggaggttgcagtgggccatgatcaagccactgcactccagcctgggcgacacagcaagactccatctcaacaacaacaaacaaaacaaaacaaacaaataacaacaacaacaacaacaacaaaaagagtctctttggcctctcttgggctaagtgactcgtgtgtttgtcttgcctctcctttaggcagggtttactcttctattccccagagcttctaaagatcctctttagctaagaatttgttatcagagaccccagggttaccaagttgttcagaggacatacaaatagtgactaaggaactttaaaatgagtcttccattacacttctcaagttcttactagcatcaatccccagccacctcatgaacatcagagattgtcctagatgataagcaagtactgcaaatacaatagaaatggatcacaaagtaaaattagaaatcttagagaaggtacaggacttcttgaagtccgtgaaagtgagtttagagaacaatttgaattcacacccaaaattgtagacaattgaggacctaacagagtcatattagttattaccagcaggagagagaaaatcagtaaggatggtggcatgatgggtacttcccaagtgaatgattggaatgtcaatgaatgaagaaaggaccttgggaaatatgaaaaacttttgaatattttacaaaagtcagtatgaagtgagagatgttaaatgatgccatgattcaattttgtcagaaaaattatgccaaaaaatccacacttaattcacaccttgttcatttaaaaatgagagcataattgctattttaatttaattttgtgaaatctaagatagtttttcattttacaattcttagtttctatgataaaattccatccaaatgccctgaccccaattatactatgctatttttgtcaccttaaaaatgtggattcactttaaagtggactttttctggtattaattatcctgatatagaaagaactttcagtaattcagtaaagcgatggattaatcaacatcatttttccagaaccaatgactaagaacattacaggcagaaaggggacaactggctttattgactcttaggcggaacacaagggtccatagaaccagccagatttctctgggaacggagttgcctagtccagctaggaggtaattttgggataagcatgcttaagaccttaaaagggaactcttaaggctccaaaggaagttgcttacccacaaagcaccagaccgcaaaccggatccatgtgatggtggagagctttagcatgagatagatgttcaccagcatggcaaaggcaggcacaaaggggaggcaaggggccatgtagggcagcttcttggggttctctggctgctgcaggatcacaaacaccagggtgctgatcagcagcaccatcagaacaaccagaaggatggcccaccagctctgctctgagatgtagtcagaaccaaagatgatgaaggagcagaagatgaacatgaggatgaagagcaggagcacgcagatggtcaccgtgtgccccgtcgctgctgtgggccggtccattttgcctggaaggcccagccggattctcatggtgtaataatgaggcccaatcagcttctttaacttgatgagataaatattttcggattcatcagcttctatgcctgtggtcatgtccacggtgccgtaattggggtggttgacgttgtaggttgacttgtctgatttccctatgagcatctcattgtctcccaaggatggtaagttcttggccccacatgtgttggtggctgggccagaaaactcatccccctcactcacaggagaacaagcttccttctcacagtcagccagaatgccctccttcttcttggtgtgctcctcagacaagaacttgacaaaaccatcaatgtcactctcaggttggtatcgaaggagcaagacacagacagagaccaaggtgtaggccaggagcgtgccgatagacatcatctctatcaggtctctcaagctgaccaacagtgcgaggagcgctgccaggaaccccgacacgatgcaggccaccactggtgtctctgtgtaggagctgacgtgagccaggaacctggaggggccgggcaagcagagggttaatggtgagctacagtgaccgattccagtgcagccaacatagggagctagaactatcaataggctggtgtgattaactcctcctggtcctgctccaccaatttacttctgcattcactactttaaatccagctgctattcctaccccaggatttggtatataattaaaaaagaattcactttaaatctttgatttcttttttttttttttttttggtgagatggtgtctcactctgcttactctgtcccccaggctggagtgcagtggcgtgatctcagctcactgcaacctccacctcctgggttcaagtgattctcctgcctcagcctcccgagtagctgggattacaggcatgcaccactacacccggctaatttttgtatttttagtagagacagagtttcaccatgttgaccaggctggtctcgaactcctgacctcatgattcacccacctcagcctcccagagtgttgggattataggtgtgagccactgtgcctagactagttctttgattttaaggcaaagttctttagtaaagttcctaatcattatgtaatgggaagggttgattgaacctaggaggtctgtctttcagaaacctagattgaagcccaggctctgcgtgaaaaagtgatggttggaggaagtcatggacctgcttgggggtcctcctgacctgtgaactagcatcttagcattctcttggagcttgttagaaatgtatattctcaggtttcacccaataactactataccagaatcatagtagggtgaggcctagcaaactgctttaaaagacctccagaggattctgatttatgccaaagcttgagacaccacctataacaaaagttcatgggtttagttggcaaaatagcacagtaattgagaaactgtgctcgtagatacagatttatgtccagctagttactgactgaagaagagaccaagaagagcgactgaatggcatgtgcaataggctccctctcctctcccctctcctcctggtcccttatttttatggttcacacaagactgtaaatgtgtttgaagccccagtatctttcctgttagtttctttgacagcagaaaaatcttttggatgtgtgaagttcccacgcctccatcaccctaggcccctcttgatctgttcggcaacctaatcacagcagctctgatctggtgatggcttcagagagtatgcaggggaaatgagtcagaagatgatgtctgcagagacaaagtccctgaaccggccccctctgcacacctgagagctccttggcctccacggtttactccttgctttgtgcacttgaagaatgccttctcagcaggcccctcatgctggaaacaaagggctggggccacatcccctttgtaccatgggcagatgggccacttcatggccaatgtagggggcaagaactgccaatatattggtgtggttaaaagtctgatttttggagtcggatgttctgggatcaaatcctgacctgccactcagtagctgagggatttgtggcaattttgtttcacctctctgagtcctagtagacttcatatgcaaaatagagttactgtgaggactaaatgggatactgtatacacagcacccaggacacacaaatgttcaataaatggcagctggtgttgcaggtattgttaggatctgttcagagggtcttatctactctttgttgactttttttttttttcattttcagaggggctgtggagagtggggcagttaccaggcctcaatgtgagggcaggcctaagatgtccctaggatggttcttccttctggaggccacccagtacagcagtttggccccatcatcttcacaaaggagcacgcaatgtcgacaggagggaggacagtggggggacacacatcagcttgtgctggattaagggactgcagagttaaactaggggctgcttcagggcctgagctctgttactcagacttttcttcaggatacataacaaggtccacagtccatgtgaaaggcactgatgtcaaaatcacagtcagtctgacagtgggtagacattctccctggacagacgtggcagagcaggataaatttcatggagcatagcccttacctgaaaaggagcccgtcaccagccatggcataaatgaccctcggcatcgggaagagggaccccagcaagctgactgtcagtcctgcaaccgacccaatggccactacgaatttggcagcatagaacccatgagccacaaacatctccatgagtggggattccgtgtcaatggtataatatggcaccatcagagttaagatcacgctcacctgttaaaacaagagaagacagggctggaggtacaggggaagaacagcatggatagaggccccacgggagaggaaagagccctgcccctggaggcagaggcttgcatggcagtttggatccattcacttgctggcatgtgcctttactgtagaccagtcatctggcctctaggccttgctcaatattatttccccacatgtgaatttagtggactgggccagaaactctctatctctctggtcctttgatatctgaggagtaagtctgcaggtatttcagccccatgagcagagctatgctaacagttcagtggagagcagatatttctggaaggaaggagctgcagccaatgccctgcaaccagggcctggcagggaccatgagcaccctgcccacgtggacaagactctcatttctcttctgctttctggtcctacagggttttatccgtactccctctcactgtgaaacaccagagataaaatctccaaagataagtgcttaagaggtctatagcctattaactgttgggacccagataaggactcatatttctatttcctttctctagcttagtcctaggatccaggcaggccaacagacaaatgatggcatcaggacagaatcaagtcctactgattatatggctgtcagacaactatggctttgcttaatcaggaatcatttactgtgtgtgctataagggtccacccccagagaagagggagatgcgagggaggagcagaagaggaaatagagagcagaatgtctttgctattccctctaccctaccacccctccttcaacactctgcctacggggagaaatcagggtatggacaggacaaagccactggcatgcatgtgcatcggggaggtgataagcacttaactgggggctcccaggacctactcccctcgcatattattgatctgcctaacatccctgccttcagaattggccataggcaatggagccaccagtcatatggccagatatggggggccccccaggcctatgaaggccaaattgacatcaagaagggattcaaagcctgaaggaaagagggtggtcacatgtagaccatttctttgcctattcctctggagccaagatcctccagtggagccaagggccaccaaggaggacaggatgtcctagcaaagcccagcaaccttgttcttctcatggtgggggaggggctgcctgctgaccagtacaagaccaaacagctcctagggcgtgtttaaggcctgtgcagtatgaaagagaatgtttcctagtaacataaccacttgcaatatttcctctggggatggggcagggtgggctggaggagagtgggattgagcctcctccagcttcagggagtctcctgagttagatcaggatgggtaaaaagttggtggatcatagaagtactctgtggtctataaagtgctattctaaggagggcactgtgatgattgactttattgtgtgtgataagggcccactcctggaggaagggcgggaatgaaggaggagtagaaggggaaatgcagagtgtccttgctgttccttctgccccgcaacccctccctcaacattctgcccactgggataatcagggtatgtatggacacgatgaaaccccttgcatgtgtgtgctagtgggaggtgataattgaggcacccataaaacctctgggtaggcagctgaatgtctgtaaacgaccctcaagtttgccctgtgtttttctctggcttctagaacaatcctgtttgcagcttgccttaatgatcaattggtctggcttccttagctagttgctaaagatgtcttttttgggaaagagaaacagcagggctgatcagcagcagcaccccccactgccagctctttcctaattgtggtgacccaagtgagtgcgcccctcaggacctgagaatgtttgtggaaccacacacttcctggcctgtgagccaattttctccattgccaggggcagagggggatgttggatgcagctgggctatttctgtgatagaaattctgggatgggagctccgagagcaagcatcagagcatgaggagtgtctcaggggcgtgatcctgaggaagacaaggctgaagtctttatcctgaggctcccctaggtagggatacctgaaggtgaatttgagctggtgtaacaagagggagcaacagctgaaagaaatggcactttcctccccagatttaaggggaagagagtttgtagaggacaatgtattctctctccccgctgtgcagggagcctcgcctctttgctgccgggaagctcccagaagacagaagagcattgaggaaagtgcacagaggcccacaatgcctttgcttgcacatccacccgttactgccagcctatgacctgagctccttggatggcagcccattccctgcacaccagcccctggggcagcagcagacaccaagagcttgtgaggatggaggggtgggaatgaaggccaaggctgaagtgaagtcctggggcttctcctcttcttcagtttggagtcctaatttttttcttgtcatggggagtggggaatggggctacaggggacaaaagacagacaccaagaagacataggaaaggactccttcctgacagagaagggagctcagtgccagggccacatcgtgaggagggtcccgcaagcatctggtacttacagacacatatgctgtcaggcagatgaccagggaggcagtgatagcataagggatggacgtgttgggattcttggcttcctctccagtggtggcgatgatgtcaaagccaatgaaagcgtagaagcatgttgctgctccttgcagcacctgtgtggatgatggcatttgtcagactcagaagatcggggtggcacctgggtcttaaatgtggaaagtgcaattgctctatgccctgcagacatgactgagtggctgagggagtaacatggtggaactcgtgctaaacacgcaggttctgatctcctctactttctagctgtgtggctgtgggcaactctcttatgatgtgtaaatagagataagaagaattggccgggtgcgatggctcatgcctgtaatcacagcactttgagaggccgatgggggtggatcacgaggtcaggagtttgagaacagccttaccaacatggtgaaaccctgtctgtactaaaaatacaaaaattagccaggcatggtgacgcgcacctgtaatctcagctattcaggaggctgaggcaggagaattgcttgaacccaggaggcagaggttgcagtgagctgagatcgcgccattgcactccagcctcggcgacagagggagactccatctcaaaaaaaaaaaaaaaaaatgcttctggctcttagtgtaggggattcagatacttctgcataaggaagaattatcctacttaaattactgttagtacccctgacagatcagctctatggtaacttccagatctaaaatgatataaaagattttcagatcttcagacattctattgtcttcactgggaagacatggtaaagacagtttatttgttgctccttttggggcttgaataacctagttgggcacgaggcaggaggtcagagtaaagctgggggatggtatccgctcacatctgctggcagtctgtctgccaggagtccacatggctccaggggtgtttgggaatgtattatatatgtcaaaatgtcagtgaaaaccttccattgaagagtggctactttctttgaaagaacctattgaagtttaaatgagggttccccacctcagtattttcattgttagctctaagtaaaaaagtgcctctttgaatgcttagggacgtccttttagaaggtgagagatatttttggacttgtgtgtatggggtgagggaaaaagaagcaagccctagccagtggtccaggaggtgagacccattgcagactggaccattttatttttcttttctccacattcagtttataaatgatggaaatcaaaacgtgtgccaagctgacacttgtccaaaattgtcactcttactttcctcactgacttctcaataagaccaaatatgaaatactagaacctgtaaggtacatcacaaaattaaagatcttctcaaaccttcagaagcaaactttgctcatctgtaaaatgagctggtgtttcctaccgtttctctcagctaggattctaatgtttcaaccctctactctggggttcttatcctggaggccatggaattcagggcatctaaaaattttgctggtaaagaattgcatatgtttttcactaccttctagttgaattagcatttctttcagttatgaatgtaggtgacaaactaacaatacctgtgcctgtgtcaccaatagcaatcagatattttcacttcatatgagagttgttgcagagatcttgaaatatcacttatgcttattacttctttcagattatgatagttattacacatagaggttaacatataaatccctaatagagaagcacattgttactagattacaatataaaaataaaataaaattaaaaatacttaatactacatttcaatataattgatttcctttgaattcgtgtgtaattaggctattcatttaaaatcacaattctcataagggatccacaggcttcatcaaacatccaggtggtccatggcacaagaaaatttaaaaactcctggtctattctaataagtcaggtagaaagaacttctaaaatacaagcagttccatctctagatggctactttccagaagaaaagagaactcctgctttccctacagcaaagtttttcatacagtggtgtggaaaacgtctttggcctccagacaaggagggaaaatagatctcacctcatcatacatggaggttcacaggcttggaaatgtgcttgttttcacttatctagaaaatattactggtcttcaaggatgaacggatgctagactgctggctcactaagtagtcctgatcaagaaaagtctcactttaagatagttccttcatttttgacaaaggtgccaagaacattcactggggaaaagacagtctcttcagtagatagtgctgagaaaactggatatccataggcagaagaatgaaactagacctttatctctcatcatctacaaaaatcaaatcaaaatatattgaagacttaaatctaagatctcaaactatgaaactaccacaagaaaacattgggggaaaatcttcaggacattggtctgggcaaaaatttcttgagcaataccccacaagcacaggcaacccaataaaaacagagttattctacacgttcaagtcctttgtggaaataagcggggttataaataaatcagtatgttggctatctctatatcttagggaactcattcacctttttgtactttgttttcatccaacgttttcaaacgcaatcataggctgtaagactacccctaggggatgtttggaaagatgtttggaaaatctccaggacactggtctgggcaaacatttcttgagcaataccccacaagcacaggcagccaaagcaaaaatggacaaatggaatcacatcaagttaaaaagcttctgcacagccaaggatacaaccaacaaagtgaagagacaacccacagaataggagaaaatatctgtaaactacccatctgacaagggattaataaccagaatatataaggagctcaaacaactctataggaaaaaatctaataatctgatttaaaaaatgggcaaaagatttgaatagacatttctcaaaagaagacatacagagggcaaacaggcattgataatcagataaatgaaaatcacaactataatcagatattatctcacctcacttaaaatggcttatatccaaaagacaggcaataataaatgctggcaaggatgtggagaaaagggaacactcgtacactgtttttgggaatgtaaattagtacaggcactatggagaagagtttagaggtttctcaaacaactgaaaattgggctaccatatgttccagcaatcccactgctgggtatatacccaaaagaaagggaatcagcgtattgaagagatatctgcattcctatgtttgttgcaacactgtttacaatagctaagatttggaagcaacttaagtgtccatcaacagatgaatggataaagaaaatgtgggacatatacacaattgagtactatgcagccataaaaaagaatgagatccagtcatttccaacaacatggatggaactgaagatctttatgttaagcaaaataaatcaggcatggaaagacaaacattgcacattctcacttatttgtgggatctaaaaataaaaacaattgaactcatggacacagagagtagaaggatggttatcagaggctgggaaggatagttgggggctggacggggggaggtggggatggttaatgggtacaaaaaaagtagaaagaatgagtaagacctactattagataacataacagggtgactatagtcagtaataattgtacattttaaaataacttaaagagtgtaattggattggttataactcaaaggataaatgcttgaggagatggacaccccattctccacgatgtgcttatttcacattgcatgcctctatcaaaacatctcatgtaccccataaatatatacacgtactaagtacccacaaaacaaacccagaaaaacaggtcctgctttctcttcctttaacatttattcttcccttctacacacacagacacatatatgtacacacataaacatgcacacacatgcaaatacatataaacacagataaacacacatacatacacatgcaaacacatatacatacatatacatgcatacataccctcctcttgtaaatcatttagtgacttggcacaacaaccatataaatttgggcaaagcaatcttagaaaaaggtgagaggtttgtgaaccatgccacgtaaggaagaactggggacctggggatgtttaacttgaagagcagaagactcagtggaagatgaagaggacacctttaaatatgtgcagtaccggcagttggagtcaatgtgatgtccactgtaggcttcagaggaaatcctagggccacacacatgggagtgactggctttagttaggagcatagactttgtagactgtcaggcccaggttgattctgccacatattagcttggtgacctagaacaagttcttaacctcttggagcctaagtttcattcttacttaaatggagataataatagcacttagctcatagtgttgttacaaggataaaatgagataatagagtaaactgcagtcctataatacagtaggtgctcagtaaatattagctcttaccaccagtattattattacaattctaagtttttctagagcagttgacacccaagggcacaaactcctcctccttctctcctccttctactcccctaccttcctccttttagaacttgacttgtgtgtactaagtgctaccatgtgccaggcactgtgcttagtgatggggatatagtcatgagcaagtacccagcttgattttacagagattgagtctagaggatactgtaagatccgaaatgcattcttgattatggtaacaaactcaacaagattaataagcatctatattattcatgaaacagaaatgctactttcctctaaatgaacaagagaagggatggcaattactgataatgattagctattagaaagttaattatgatcaagtagggaaaagaggaagtaaacttgcaaagaggatgtctcttagcctgcatttgcatatgtagaactagaaagcaagtacagttggagaaagactggacagatcaaaggcaggacatgtggaggttctaccacattaggcagtcaagataatttattaataacgcagatgattcaaacaaaatttcaatgagggactataggcaggtctggggagtatttaggcagggttaagggaggtgtctagggatgctgaggcatcagagacttagcaacactgagaagctctcatcctgaggcctaagtgtagggggtggaatggtgtcctggagtccggtgggagctggaggtatggggcagagattcctagaagtagcggccttgtggaggcacagccagtgtggtgccaaggttgggaggcagcgaggaagaaatactctggccttgctttcttctcgccttctgacttgatagtatttcccactggctaaattcaacaggaagcaacctggagcagagaacagggcatgaagggtggagaataggtctggggagcggaggcaaatggagaagaaagaccaacacacctaccagggtcaaaccaaacttggcctaacaagacatagatgaaataaacagattattaaagagaagatagaaaattagcaaaaagggtcatctttttacttgagttggtttgaatgagcttttcttccttgcaagcaaatggtccctggttggtaaatacaaagacccatgaaatgaaactgtatatgggtgtctctacccaaagaaccactgaaaccgttttctacgtcactctatccagatctcagatctgaccactggtgtttataattaggatagacttccatgcataaaagcacatgtgcagtacctaggggtgagcatctgtgaataaaattggtgggtgaaatatgtgtatgtgtgttcgtgtgcaagtgtatgtgtatttctgggtttattggtatgttatcctaactctttgctttaatgttttgcaaaattaaaaaatagtattgaaaaaaattagctaggtgtggttgtgtgcacctgtagttccagttacttgggaggctgaggtgggaagattacttgagcctgggaggttgagactgcagtgagctgtgatcgcaccactgcactccagcctgggcgacagagtgagactctgcctcaaaaaaaagtactgacctttgtatttgatgatatagctgagattgttgtttgaagtcaacctggtgtaaaaactcagccagctgatccagaacagagttcatccctctagaatggcattgtgggaaagcagcacgtgcctcagttgctggagggcttctgcttagttaattgtcaaaagcaatgtcattagtggcctgctactcagtatgtgaggtccctaaaaactggccccctgcgtcttgctgatatttgagaggcattcagatgaggcagccttcacacattctgcctcagccagtctgccggatgcctgggagataattaggcgcctttatgttattcactctctaggcaacaaaattccaacttttcacagcattttctaccaccctcatgccccagctctattagcagcctgtccccagtgacagtggaatgtgctaataggttcccacaaatggattcagatgtggagaacatgaaaaacaacttttcctttgtttggaggctgtcaggattccccacaaatgattgctatggaccattttcctgggagctatttgtgctggtagagtgtcttatttgcttaaagaaaaactataagatagtatcaagaacaaataacatgaagggaacacgcgtccagcaatgttcaagggctgaggaattgcagatggaagcaggggttcagctgaaggccagagttacttgatatagggaaaaatgtttgttgttcttaaactcttcaagaccacagaagcatttgacccagaacctgtaagtgagtaaaccattccttaagctattttctttggaaggaagtgtttggagcaggggaaagagtaggtttatgaggggtccctggttagaggatggattgttcattaactctttcaaagtccttgagaattgtgtggaaagtcatgtcatgctattcttataaatcatctcctatacaatggtttcctccattccatcctacctaaagcaattgaagaataaagtgggttggacctctgtactagtcccctagtcaggggtagaggtaagggttttgataaggagtgaagaagttcatgtatctgttgacgaggcaacacacttctgtagacgatttttaggtaacagagcgaggaatgtgtgtattaccttggtgtatgacatgctcatgaggcagtgtcagaccttaaaaaatagggtctaaattcaaaatgactttgctggactttggaaaagtgacctgaaaccaaagttgagaaataacaggtccaggcccattcactgggaaggaaatgtactacgtagaaatccaaggccaggcagagtgcagagaggatgaatcagcaacatcttcacactgggctgtcctttgttctcagatgatacttttaggcacattcactaggacatatatcatccccaagtttcctttagggataatggaattgcagcaaaacattcacaatcccagccaaacttttttcttggccaatgacaaatctactcaaggcagtaggcttggattggaatgaggacagtgaacagaagtgcaaaaaaagataaccagttcatggtcccaaacccaggtggcagtggggtaaataagtactttggcccatccaggactgggatcgaatttcagctctattacttaccatctagatctgtgtctttaacttttctaagcttgagctatttgcatgtaaaagtggagagctctgtacttattttgcagggctgttgtgaaaattaaattaaaagtgtacatgaaagagtttgtcacaaagaaaatgttcaatgttgggaaaagcgtccttcatttctttcttatgcctgacttctgatcttctcttaggaaagttagtgagaacccaggatgtataagtggggaaccccaaggctggcatggttagctccttccttgatgaggcaggctcctgattgaggaaggatgtggagcccctgagaaggaaagggagacccccaaagagaataaaggcctcagaacaaaacacaaggctaaaggcaacgctaaaatgtgcctccatcttcttcaggatgggtaaagaacatttacacagaggatattaactctttccagtctttaagtggggcctaaactagagtgtgtgccgtttgggtgagctaataggaggattttgaaaattaaatatcaatcaagtaattaagaagagttttagaattgcattgacaggatgtcttcataaacaatgcatatgcagcctgggtcagttgaactattttctatctcttaatgttcctccaagattctctgacatcatgaaagtttaaaggaagtataacattttagatttattaccttactacttactaaagaaaactcagagagaatgagcgtgatacacaaggtactgctttggtagaaagggctttggagtcacacagatctgggcagaaaccccagccccagagctgactaagtgaggtcaggtcagtttcgcagcctctatgaggattctccacttttaagtaagggataacagcaccactcaaaagttttgttttaagggtgagatactattcatggaatacgatgccaggaacttaacaggtagtcaataaaaactagttccttcctcatgtagttttaactattgacaaccgtaacaagctgcacataaaaacatccaagattttgctgtttttttgcaaacatgtagtgcaattagttttgccacataatagataagaaaaactgaaagcacagaagttaattgatggccaaagtcttccagtaagtccatgacccaataatttcttatactgttaagaaaatggtgaggacattttcctgctacaatgaaaatgcaactgaggaccaagaagcagcttctcggctccttctggaatctctgcctggttcagcctgcctgactccactcctgcctccaccatgtccatcagggtgacccagaagtcctacaaggtgtccacctctggcccccaggcctttagcagccgcttttacacgaatgggcctggtgcccacatcagctcttcaagcctctcccgagtgagcagcagcagcttccggggtggcctgggcagaggctatggtggggccagcggcataggaggcatcaccactgtcacgttcaaccagagcctgctgagccctgttaacctggaggtagatcccaatatccaggccatgcacacccaggagaaggagcagatcaagaccctcaacaacaagtttgcctccttcatcgacaaggtacggttcctgcagcagtagaacaagatgctggagaccaagtggagcctcctgcagcagcagaagatggctcggatcaacgtatttgagagctacatgaacaaccttaggcggcagctggaggctctgggctaggagaagctgaagctggaggcggagcttggcaatatgcaggggctggtggaggacttcaagaacaagtatgaggatgagatcaataagcgtacagaaacggagaatgaatttgtcctcatcaagaaggacatggatgaagcttacatgaacaaggcagagctggagtctcgcctggaagggctgactgacgagatcaacttcctcaggcaactgcatgaagaggagatccaggagctgcagtcccagatctcgggcacgtctgcggtgctgtccatggacaacagcctctccctggacatggacagcatcatcgctgaggtcaaggcacagtaggaggagatcgccaaccgcagctgggctgaggctgagagcatgtaccagatcaagtatgcagagctgcagacgctggctggcaagcacggggatgacctgcggtgtacaaagacttagatctccgagatgaaccggaacatcagccggctccaggctgagattgagggcctcaaaggccagagggcttccctggaggcccccatcgcagataccgagcagcgtggggagctggccgttaaggatgccagcgccaagcggtcggagctggaggccgccctgcagcgggccaagcaggacatggcgcagcagctgcgtgagtaccaggagctgatgaacgtcaaactggccctggacatggagatcgccacctacaggaagctgctggagggcgaggagagcccggctggagtctgggatgcagaacacgagtatccataggaagaccaccagcggctatgcaggtggtctgagttccgcctatgggggcctcacaagccctggcctcagctatggcctaagctccagctttggctctgtcgcgggctccagctcattcagccgcaccggctccgccagggccatggttgtgcagaagattgagacccgcgatgggaagctggtatccgagtcctctgacgtcctgcccaagtgaagagctgcggcagtccctcccagcctgcctctactgtggctcccccagagcccgggagggaggctgctgtgcaggggagcacagggaacaggagacccacctgaagctcagccctagctctcagcccacgcgcgggggagtttactgcttggggaccccccttgcctccagctacaaaacaatttaattgctttattttgtccaaaaaaaaaaaaaaaaaaaaaaagaaagaaagaaagaaaaaagaaaatgcaactgagttccaggaaaacattccttcttttcagtcttgtaatttgttgtttctcttatatgataggaaaggaacagtttgtatcataagataatatagatctggggatccagaatggggccaacagtgtttctttgtctcttcttttgggtttaagcagtttcagtatttattcatttcaaagaggagggatgaactttgtagttctgtggaattcttatagataaggagaagactaggaatcttggcttaaattgcttccttgcttatttctctgcattgaacggcatggcgtggttcggaataaacaagtgattttgagtgttctccaagaaacatttctgatccctggacatgttggagaaaaaccagcctaagcaaaagctgcaaaagcaaagtgggtggaatcctggacttgctttctgtcatcagttctaggcagacttgcctctctcgaccttaggttgttcatctgttaaatgaacggataggaccaggtaacctctaaggtccctgacagctcaaaattctctgatttatgttctaccatgaaaaagaggtgggctagtgaatttcaccaataaatccacaacataagtatttttagtcatcctagagaaagaaaccaggtgcaactcacagccacttgtcagtataaagaatttgcctctctgaccttcctatttttctctagcataaaccgcactagccagatcatggaatgagatctgaaaacatccttttggtccagcccatgctcttgctaacccctagaccacaccaggtaaacctgcctgttatgaactatgcctttggaatgggatttatagcacagccctccattaggccagctcagctgtcctctgacctcagtaggactctcctcctagagtcaaatgctgacattggaattaaaaactgttattttcctagtgtcatacccaggcaaaactcatcccttccctactgtcccctttccctggcctcctttattgccttgtgtatttatgttcttcttgatctctcttagtagattgtagacataattctatagaactgagctgttcttgcacagactttggagccaggcagtcgtggctgactgggttctgccacttacattgtgtgtttaacagtaagccatttgaactctctgaatgggagtttttttcatctttaagagcagaatgtaaatatcttcctcacaagattatcaggatgattaaatgagatagtacgtgcaaagacacttagcacaattttaggcaattgcaggttgccaaaacattgaatctattattattatttgtataaaataagatcttaacaaatgcctgtggaaaaaaaaacaacacacaagaaccacttcttcaggatattccaactaaattaagatcaaaaggtgataaagagggtgctgtggtaattatggaacagaacagcattttcttgaaaatatgtcttaggttggtcacagggtagaaggcagagtgtgtgacaggcacaccaggtgtttggaacaaacttacccctgaccagccgtggggcaagaactggccctccgcccagtatttcccattgatgaagaagaggcctgcgatcatgatgaacacccatactgccaggttcagcacattgagaacattgttgaagcctatggaattcttcacccccagagcaacaatgatggtcacgatgaccgcgatcaacagagccagaaggtctgggtatgattcttcacctttccctagagaggaaagacatgatttgacattgtctggagggaagaaagggccatgcaaactcctggtcctaccccactgcatccgtactcagctttaagaagggcagtaaactgggaggccgaggcaggcagatcacgaggtcaggagattgagaccatcctggctaatacggtgaaaccctgtctctactaaaaatacaaaaaaattagccgggtgtggtggcgggcgcctgtagtcccagctactcacaaggctgaggcaggagaatggcgtgaacctgggaggtggagcttgcagtgagccgagatcacgccactgcactccagcctgggggacagagtgagactctgtctcaaaaaaaaaaaaaaaaaaaaaaaaaaaaaaagaagggcagtaagtctttaaaaggaactctgtgtgtgtgtgtgtgcacctacacatgcctatgctatagtccacaagcagataccagtatctatttgcaaatgagcaggatttggtagataggtaagatgatctggtatcctggaccaaaaattgggctatgtggtgtgacaattacaacagcgcctatgaaaccatggcacagaacatttgaagtgggaaccatcctgggatatttgggatgtatatttaggtctaacatgtttgaaaattgtttttagcttcattatttttaattttacagtctgtaaaatttccatcccattcccaaaccttttctttatcaacaattttaagaatgtgtgtctttgaaaatgatggtaagaggggttttctgtccttttgtgtatatgtggttgtagagaaaaaaataaccagtgaacacgccctgcctgcttggttttgcccaacggccagtggactcctgccctctatagagtggaaaaggcactgcctcagctgcagggatcttgaatttcagctgtacttttgcccatagccagatgtgtggccttgggcaagttgcctcatctttctggacctcatttgtaaagtgaaggacatgaatggcctgattttggaggactcttttagacctaaaattctatgcaatcagtacacagaacaggtttgttctttatatttttatcttgtcatggtacttgggtgctcagcatttttgtcagttcttttgatataggaatatcgaagttagatgacttgacacagccacagaatcattccttggaagttctgaggcaagattccagagcttcctcaactattgtttagcttttctagaatgtgagtttatcaggcatcaagatggagagtggccgggcacagtggctcatgcttgtaattccagcactttgggaggccaaggtgggtggatcacaaggtcaggagtttgagaccagcctggccaacattgtgaaaccccatctctactgaaaatacaaaaattagctgagtgtggtagctgagtagtaatcccagctactcaggaggctgaggcaggagaattgcttgaaccagggaggtggaggttgcagtgagcccagatcatgccattgcactctagcctgggcaacagagcaagactctgtctcaaaaaaaaaaaaaaaaaaaaaaaaaaggagtggatggcaaatgatggatggagcctgaggtctcatggtatttgttacacgagcttctgatggtttagcattcactgttatattacccctccctgacctcttctaggctggaacccattttattcattaaattttttttcattgaaatttggaaaaaaaatctgatgaaaccactggagaaattgctgacagttctttttttcctgcattggttttatttttatatagttattgacatgtgcctgtatggtttgtagcctttgacgtatgacattacattaaaacataatccatgttattacaagtttccctaatcatccttttaattgctagctacatagtatttgtctgcaatttacttagtcacttgccccactgtagaatatttaggctgtctctaactttttgttattgtaaataaggctgtggtgagcatctttttgtataatgcttccatggacattagaattattttttaaggatggatagattcatagagaaagaattactttgcaaaagaaaaagagagatatatttaaggcttttgatacattttgccaaattgctttctgaaaggagaactcatttatgtggcttggtaagtttgcatgttgagggtaggaggatgtggcagtctcacccaggccattgagggttcccacgctgtccgccatccagcggctgatggtgtggttggctagtgagtcaaacatgctgctcagagcactggctccggccgcagtgccaatcaggtactccaggatcaggttccagccaatgaaaaatgccacaaattccccaacagtgacatagctgtaggtgtaggcagatcctgtggtcttggggactcgaactccaaactctgcatagcagacgcctgcaagggacagacatacacagatggtggacttcaggagatgagctgacatcctgtggccaacaatcttgggtggaacatactgagactttctaggatctcagaacaaatacacaaagttttatgtatatgaatcgattcagagccaactcttacctcttccaacctcacttctgaaaaatgcaaacttgaatgactagcaaggcaatcagaactaattctactaaactgttggaaactgatctttatttagaaaaaattccacttgtgtgtgtctctatcatgctccttaggtgtcagatatcctgtgtgaacatgggcccaattcatcacgacccccaccctagatggcaccagggttatattatgcacaaacttcttctctttcagtttttacatattatagaaggtgctcctcatttgagagtgatactttgagcaatctgtgaaaatgctgtactatatctagggggtagataaaagatgcaaatataaataaattactaattattaacaaggaaatctagcacatgcacaaaaagtaatttaacaaacacttttagagtcctaccatgtgcatggcagggtgtgaagcactgggtataaaaaagacaaatggcatatgcccctgcccttaaggggagagaggccatcagtgcccactgtaggctgtgtaagcttgacagtgtaaaaatgtataacaatgagaggagagatgtgagacatgtacttagagggttttgaggcatatgtagggattaattggatgaagaaggtggaacatgaggcaaagacatggcagagagagacagtatgaagtatttgggtggaggggagtgtgcactgaggtattaggaggagatgacgctggccagctaagcagagccatgtgttttccaaagtgggttcagggcccacttccaccagaatcatcgattgaatcctaatttcaggagataggaatcaggatgctgcattttaaccagttcccaaggtaatacatgtgctcacttgtatcagaaatgcactggaatattgcctcattctctgacataattagagaatatattagaaagagattaagaacataccaaacttctgggagttgggagagttccctattttgtgctaggaattctgggtgtgggccagtgggtggggcaacgagttggaggtcagacataggacagcttggaggaaacataccaggggtgggatgtaagaggatgtaggagggaactcaaagtcaactttaccttcagtcctaattttgttaagggccaaccctgaagttctctcatcacaaaccagggaacaatagttcactcttttgtgaataaagagagcaggtttcttctcatttggaagggagtgaaatcaatgcaaagaagcaaaaacagagatgtcaaaagcaatggcacaataaatgattccatgtgatgtactatctcttctttcccctcagctgcttcagttgtcaggatgtttacacggaagaagcactggaccagttatgctgggctcctgtttctactccatccctgtagattcagcatccttgtttctaaaataaaagtattacaccaaagactctcttacggatctcctaactctgaccctctaggattccatctgttatattgaactttgtagtattttttgctgcaaaatctgttgagcacagcttagcttttcttttacatcagttacaatattgttcagtattatggagatgctgtcagggatagtgaagctgtttgtctctacattaaatggcccagtctgttatttattttgagttcctatgtcagccctcctccccttgctttgtaaatgtagctttccatctccttccttgatgtcagactgtcagtttttacttcttgttgctgtcccagtgcttacctggagcagtcagactgcctcttttctaaattgctgcttccaacacctgatatttaaattgttagagtgagtctaaaattaagaggaaatggtctttgaagaaggcctgaagaactcttccatggggaaagtatagagtgtgcacgcattaaatacaagaacctgatgatattttcttggatgccgtgtgttttcagggttctcgggagttgagtttgcacatacggattaggttgctctttcagtgatgtgtgaggaaggaagtgaagatgcaactcacttccctgctttggtattggatccacagcattatccaattactcctatattctatgagcttattctcatcacccaactttaccacctgatattgtacaagatttataagtaaaatcttttccaaatgatgcttttgaagcaggcatcgatttgattgcaaatttaatttggagagccaatatttatggaatttgtgcaatcaaacattctctccataacattcgatctgacaaattaaatttaaaaatacccccattttgccaccagaatacacttgccaagggtaattagcaaatggccaagtcttcattaggtcttgtgaatggaccagtccattgctgtctgaatcagagaaagaggccctggctgtgcatggtataaggagcatttggaatcttagtcatttcccaaggtcctgctggggtcctaatgactgtagtttggggagaacactgggaaaatcaatcaggcactaaccatacaagacaatttctgcttcacgaaatcgttgttttggacacactgtaaaagatcttataatattttaaaatctttctgatttgtttgtatggagaaattcagacttagagtgggtactagagagcatctagcctggcattgaagctcactggtgataattgaatgtttacagcctcaaatatcctgagaaaaatgttctcattcaactattttaaaatatctggtatgtaagaggaacacatttaagagtatctttctaatttcaataagaaattaaaagcatggaaatggaattttattttatttttttaattttttttaaatttttttagatggagtttcactctgtcgcccaggctggagtgcagtggtgtgatcttggctcaatgcaacctccacctcctgggttcaagccattctcctgcctcagcctcccaagtagctaggactacaggcatgcaccactatgcctggctaatttttgtatttttagtagagatggggtttctccatgttggccaggctggtctcgaagtcctgacctcaagtgatcctcctgcttcagccttccaaagtactgggattacagcgtgagccactgcgcccggcgaaaccttggtttttatcctagattatctagggtcctagattactgagtgttgaggggcaagttaccctcttatggatgaaatgagacggccaattagatacagtttagggtcccttctgatgcatcattctttggttttacagctaaagtcaactcttaatcatctagttagtgagggaagccctgtaggaaatactgtatgaaccaatggttctcagtgaaggtggtactgactcctaggggaattttggaaatatgtgggagtgtctacggttctcatgatgattgtgggcacttgtggcattaagtggacagggacctgggctgtttatcattctgcaatgtgactgactcacagaatgaagctctgtcttgtatcatatatgactgctgatggccccagtggacattcatttaagtacaaacctgtttataatttttgaacttgaatttatctccattttacatatacacacaaagcatttttttttttgcatggctttttagacattgaattttccaggactgcaacagctgggtaaattgagagacagttgtctcttgtttggtttggaatttaccgacttgatcatcattttggaagaccatcatcaacaacaatgttattcatggactttgagcatcaaataactgtcctatatgagtctgcatttgtggcagttgtactcacagtggttctacaaatgactgcaaacaactgacgacttcgttgcgtctcctaatgtacgcatgccccatcattcacatgttgaaataaatattgtttttattcaaaattactttcctttgatttatctttcacactcaggacatatttattttttaaaaaatcaagtgcgtaggaaggtaaccatctctagttttcatccagaatagtagaggaagcattacaaagtatttattaccaaaaatgaatttgggtgtactagggtagagaatcactgttttaaatgagagatcaatggccgggcgcggtggctcatgcctgtaatcccagaactttgggagggcgaggcgggtggatcacctgaggtcaagagtttgagaccagcctggccaacatggtgaaacaccgtctctactaaaaatacaaaaaaattagccaggtgcagtggcggacgcctgtagtcccagctactctggaggctggggcaggagaatcgctgcaacctgggaggtggaggttgcagtgaagtgagattatgccactgcactccagtggggacaacagagcaagactctgtttcaaaaaaaaaaaagagagattaacatataaataatatttacttaatttggtgaatccattaaaaaattttgcccctgagttacctttctaatcatatttgccttatgctattatcgaagtgattttacattttgtggttatccaccaagtgattagagggagaggcatattgatttcaaaagtacttattgatatagctagagagaatcaatatgaaatccagtgtttaggtgcaggcagccatcagtgagtgactgcatgctgcagaccacatgatggaaattttcccttagtgttggtcagagatgagaattctaagtccttgagaaatataaaggatttatttcagcaggactagaggtaataagcctgcaagtctgacaccttttcaattacccacgatataaatctattgtaaacagattcctatttatattttgtcccatttctagtgttttatatttctatacccagaactatttgtggttaaattgataatttgccagcctaaaaatcagttagaacttggagtgaacttccacattgaaaagtgggttgggacaaggtaccgggagattctcgatttgcaatattctctgttaatcctcttatatgtatcccagatgatgtgtgatttgggttttcagaaaaatatggtccttttcaatgtgaatttcttttcaagttacagtctatggttctatcatatatgtaaataaagagccagccttaggtttagttctttcagacagcctacatgcaatgttgacctttctaaactatgcttaacagagcacaacccaatagcaaagataatcacgacatgcttctccctctctaattctgctgagtcacttgcagcctacccggattccctattgcccttttagaaccaggaagcaaaacttctccttcctaacagggtaaaggagaaagacccagctgggagtaggcaaaaggaggaaaattctatttttaagtggggaagcttttccacttaaggggtaagttattgggggtacagtttatataatatgatgaattcaattattatgttgcctgatcataagtggagaaaggcttctccacttaagacataaatttccctctgcattccaccaaagaaagccattagataaataagtacttttaaataagtgtactttcacctggaaggattaaatctaggggttattcacacttgaatgccaattactctacccagatagacagattttcccattaatatgtaacttatcttactttgactattccctaacctacttatcagctcatttaacagtttcccaaataatttttgactttctaatttccttcctttattccacacacattaagtggctatgaaatgaggaagtgcaatgaatgacagagacacaaatggtaagacagatttcctgaccttgaagcatctatatttcaatcaggaaagagtttaataaacagctgattccatgtggccagtatttaatactattgagcatttatgaggtgttcttggagctcagtgcggtgagcgtggttcttaggagcacggttctttggttgctgtggaagcccggagactgggggagggagccttttaagctacttcttggagggtaagctgggctttgccagtcagaaaaaaaatagaggaaagggtggtttcaggcaggcgaaaaggtgtagctgggcagacacatgcaggctactttcgagattgtggaagatgagcctgcagaggtggactgagatcaagtgattgagggggtgggacctttttaacagacgagtggactagctgaaaaggactgtacagttcatctacttgtatagtttaaagctctctcttagttgtagaactctattttccacacacagtcttatttgagagcccaatacataaataggtaaaagcaggtggctccgtttgaagggtgggagaaccgaggctggtctgctcaaggtctccttcatcccatacttccccaaagcccctcaccctcctctgtggacccccagggctgtactgagcatgggaatgggaagaggtgtcagttgctcatcagagttgttcttttattttatagatgatgcaactgagctccagatctgaagctgcgtattcaattaatggcagagtttgggctagacctgaggtctcctgatatccagccttagcagctttctaattcactcattcatttatcccatgcactggtaagggatcatctctatgtatctatatcagcttttaaggattcaaaggtgaacaggaagaatacagtctcttttttgtgggccttatagtatcatggaggaaacagaccagaaaaccaaccaaccagaaagactgtccaaaaggaaagaggctatcaagaattatgagagggagtggaggcaggtgtccaagaaaacaatttgccaactttacagtttcatgcaggcctctgggatcagcaacaactggagcgttgctcagaggttcggtcaggctgccttgagtgggccataggttgctgatatcaggccctattaggtattttgcgcatactgtgtcttatacttcacactgggtaggcaggaaggttggggtgggctgatctagcaaatggatgaggtcagtgatttctcatccatgaagtcaattcttcccaagtgccaactatctgccatctcccagacacaggatggaatcagccgttgggttacgctggtgaaattcactacttaggcccaaacatgtctgtaagaaagtcctcaccaaatacagcattttgctgagttgttacttattttcttctgatttccttacttttcttaaaacatctctgttccgtttatgcagccgcagcggggctaaggcatgctgtatatgtagctattgttgctagtcctgcctaaatgtagatggggagtggggtatgaagagaaatcacaggacctcagagagaaatgaagtgtgaattctctcagaaacatttgttttctctgtgacactgagctccatatggtgggtaatgcagtgtccccattattgctgtcttgagaagcaggttgctgggtcctgagaaacatctatccaggccctgtcatatgcggctggacccagtgaacctgcactgatgtcctcttcccgatgcccttggttagccacgaaaactgtgggtttttcagggagtgattggtcaggtgctctgtcccttcagcctcactgctactgtctcttctacttgagcaacctcggtcactccatcacctgtcagggaagcccaggcaatttttacaaaggtgtctgaaggaaaagcaatttgtctgggaatgcctatgtttctttgtgtctaagaagagacttatgatttctctgcccaagcaggcgccaggtggacagtaaccacctgtgtttaggggacaggcagcatcattaatcaggggtgtatgacatcatgttattgaacctgacagggctccaattaaagttgggtagggaatagagaactcccaagtctgccaaaccactgccccaaatatatcaacatataaacaggtaggaaataagttgtcctttgagtcagagaagtcaccccccaaaacaggtcaaggaagtttaataatttgttgattaaatgtaaccaactggccgggcacggtggctcacacctgtaatcccagcactttgggaggccgaggcaggcagatcacctgaggtcaggagttcgagaccagcctgaccaacatggcaaaaccccgtctctactaaaaatacaaaaattagcctggtgtggtggtgcatggttgtaatcccagcactttgggaggccaaggtgggtggatcacctgatgtcaggagttcgagaccagcctgaccaacatggagaaaccttgtctctacgaaaaatacaaaattagccgggcgtggtggtgcatgcccgtaatcccagcactttgggaggccgaggtgggtggatcacctgaggtcgggagttcgagaccagcctgaccaacatggcaaaaccctgtctctattaaaaatacaaaattagctgggcgtggtgatgcatgcctgtaattccagctactcaggaggctaaggcaggagaatcacttgaaccctggaggcagaggatgcagtgagccaagatcgcgccactgctctccagcctggacaagagcaaaactctgtctcaaaaaaaaaaaaaaaaaaaaatgtaaccaatctgcaaggtgtggtgactcacgcctgtaatcccagcactttgggaggctgaggcaggcagatcacctgaggtcaggagttcgagatcagcctggccaacgtggtgaaaccctgtctctactaaaaatacaaaaattagctgggcgtgttggagggcacctgtaattccagctgttcgggaggctgagacagcagaattgcttgaacctaggaggcggaggttgcagtgagccaagattgtgccactgcactccagcctcagtgacagagcaagactctgtcaaaaaaaaaaaaataaataaataaataaataaataaagaatgtaaccaacctatctgtttactctcttctctagatctccctctatgaaaatattttggaggttattgaaggtacagtctctataatatgaggaattcaagtattatcttgtctggtcatgctattgttaataatcatcatcagcatacattattttacttgactgctttatcaaatgataatgatgatggtaattgatgatgatggttatgatgatgctcatgtggttactttcaactaaagaatccacagggttatctgtgccccaagccaatcttctggcccagattggtccttcttcattgttgaagcggcaagtgggctggaactgtccttttttctgctcctaacatttttatgtgggtggcttcaggttatcatcaaaggccaccttggaaggaaaaagtcactacaaaagggaaaggtgaaggcgcatgttttcttggcatctacctatgctagactcactgtacgtggtttcacatttgatgctcagacaacctgggagagaatgccgaggccagcatcagcagccccttcttattttaggagagggagtgaggtgtcgtagaattcacacagcctctggagagagacccagagagtggttatgacaatgaagtaagatgttgcacacagatcactttgctcagtgcctgggcatactaagtaagtgcttactaaaggacaaataggccgggtgcagtggctcacgcttgtaatcccagcattttgggaggctgaggtgggtggatcactcgggagttcgagaccagcctgaccaacatggagaaaccccatctctaacaaaaatacaaaattagccaggtgtggtggtgcatgcctgtaatcccagctacttggcaggctgaggcagtagaatcgcttgaacctgggaggtggaggttgcggtgagccgagatcatgccattgcactccagcctgggcaacaagagcgaaactccgtcttaaaaaaaaaagaaaaaaaaggacaaataaaattattgctctctgtggtctggagcaggtcacccaattcattgaccctgtttccctacctggaaaatagtgatggtgatatctactatgcaggttgttatgagtcatcgaaggacaggtgttacagttcctgacatatgttaggtactccttcagtgggagcttagggccattattcattgacgaggaagaggaatcccagagagctttacttagcagtagcctgtggagtatttatacaggagcctttgcctcagagtgggataaaacaggttggaagcaagtattgttggctgatagttttagagtctcagagttggtaggaaggttagaaatcatccagagtctagaccaagccctaggtgtgctcaatgcacttctaaaacagaacctggagaagtttcttcctaggtttgaaatctttaatctagaaacttcttgttctgttccacaactgcaatgagaaattgtgagggtgaatagaagtttcccattttctcactcaacctctctttgtgagacctactgtctctcatccaggggactcttataactggactaaaaaggctttgtgcagaaaaggaaaggagacttggagctgaagtgacaaccaacaattctctcctacccgaatatttctcaactcatcactctcaggaagcaggcagtgtcccatttctaaagcaggtgaaagtggcaccaacagagatgacagatctcagaagattctgtgggggatcagccataccccctgccctgagattacaatgggctgggttcaaggtgagtgccgagaggacccacctgagccctcacgtggcctccccagcccagatgaggagcaggtgagatgggggttccactgggaggggacacattctcagaagatgactagggagggggagccacagcaaatctttcatgggcctgcacccattctctctggggggccttcccaaagacatgagagacccttcatgacagggatgccaacacacagggaggggaagaacagggccagagactccgaatttaggaggcttgcaggagagaatcttttggtgagatggattcggttacagtgcctacttctggttctcccctatcctgtgatacaaacttctaccacttttacctccttccttctcctctccccttttctactcccccacacctcagaactctaggcggattcagccttctatagggcacatgtgtacaatttgcatttttttttttttttttttttttttttgagacggagtctcgctctgtcgcccaggctggagtgcagtggaaccatctcggctcactgcaagctccgcctcccgggttcacgccattctcctgcctcagcctcccaagtagctgggactacaggcgcccgccactacgcccggctaattttttgtatttttagtagagacggggtttcaccgttttagccgggatggtctcgatctacaatttgcattttatggcgtgagtgttgccacctgctgctggtctatgaggatggaaggctggcatgcactgggtaaactgtggccgcagtgtcttctgtgcacagctgacaaagatgggggttatgggttactgttcttccgaagaatctcacctacgtggtcctgatggattgtttctagctaagtagctcctactgaatgcaacagcaatggtgagttttgagctaaattttgaacaagagaactccagtgaatggaatagtgactcccttggatacactggggggcttcttgaaagaggctttcccaccaagaaaaatagcaagtgcccttggctgagcttatagtattttgccacataagcactctcctaattaaaataatcttagaaatgttttcaaaggagcaggtgtttgtatctatacttcacatataagagaaactcattatattggttatttttctttagaagtcaaagaaatgataagctagggcatttataaacaaactctcaagagaaattaatatagccaagggctattgttgaatttattccaagtgggaaatgtctaaagagttaataaggtctacagatatatttgtgcaaatatgtgtatatgcatacatatgtaaatgtatacattatatatatattttcaattactttgcaagggacttttcagggccagatctatgagagtgacgagtggtgaagaatagtatataaaatgtctatgttgcatgttagcaaataattgcttttcacatacatattcatgacttttaacaaggcacaggcacaggttgtgtccaggacaaatgcattcgttgggttgttaaataaaggatccattctcttgcttgctgtttgctcttctccatgctaatgcttccctttgcactgtggtgttggccttcatcacaccccagaaattgccatctctaacccacaagctgtcaacagaatggccttttatcagtgtccctgcagcttgtgatgcaaacactcattccctctctgttcccttgtgtaagaatctgttcttcctttggtttcactccctttcttctgcccacttcttttctttcttcatcatcgcttcttatttatccatctccatctgtgtgtagtcatttaacaaagttctcccttcagttcttttctctccttgcaccccttgctttggtgatctcacctccttgccagggcaagtgtcaggagctttttgattccctggggtggccgtggctccttgtctgcagcctctgtgaactagcaacatgaggagtgggccagagtgttcaaagtagatggcctggcacatgcaaagctcctgagctgctgtgatcagcgagttagactccactcagaaagtctgctgtgcagacctctgagggcaagggctggtgcttggcataactccttttcatgagttttcatcaacattcctgtctcaggtgtttatcccatggctgtcggcaggtaccatgccttacttatctctgcatctctagcatctatttcagtgcacaaagttgaggctgcttaagtatcacttcttcagaaaaagtactttgtcatgataccttgtttattttcctttatagcactcgtcactgtttgtaattattatacatattgatttacttgttttgaggcacagcctattaacaatgtgttttaaggcatagccttgttaaaggaggctgttcctgtagagaagagaattcttcttgggcatatactttcagagtcaaaagcgtgctctttgcacagggttcatctggaggaaagtgagtaggaggcaagtctacccatttttttgctagcggcggactgaggagcttcagcattggaaccaggactactcatttgcactaagaacctagtcttgttaggttggaaactggccaatactcttggtagtggtgataataatacaaacattactgagcatttactatgtgcatgggcatattaagcactttacatacaaaaacttaatcttcacaagatggttatgatgcagaaactgttataatttccatttgcagatgatgaatccaagatctcaacaggttatcaggacttctcaaccttttccatatcacataacccaccttgaaaataatatttgggctaagcacggtggctcatgcctgtaatcccagcactttgggaggccgaggcaggtggatcacctgaggtcaggagttctagaccagcctggccaacacggcgtaaccccatctctactaaaaatacaaaaattatccctgcagggtggtatgtgcctctaatcctagctacccaggaggctgaggcaggagaatcactggaacctgggaggcagaggctgcagtgagctgagatcatgccactacactccatcctgggcgacagagtgagactctgtccgccccccccaaaaaaaaaatatatatatatgtatatatatattatggatatggaaaggttgtaatgtataaaagggcgaggctgctcactagcctggggcctatatcactttccaggtgtcctaaagctgaaggatccatatcttggcacacctctaactttcagcaacctgtttggaaagctctagggttaaatgtatttcccaagtcatacaaggagaaaatgacaaagcagggcttgaactgaggcagttcagctacagggactaattgcacctggctcccagatgctagctggggttaggatgtgtgttggggtggggggggagttgagacaataggcccttctttacaaatctttcccctctcttggttgtttttcatgcaaactaatgagacaggcaatctaattcaaactcttcatttttcagaggaggaaactgagatcaggacatgtgaatgacttgcctgagggccctggactgctgagggtgagagctggaatcagacctcaggtgtcccgacttctgacgcaggcctgattgtctcttgcagcactcacaattatttcacgtgtgcacatcttgtttcttcatattgatatcaagccctttgtctcagggttctttcccatgttctgcagcatctcctgctatgctgggcccagagaaggtggtcagtccctcctacagccatgctaggtgctcatggcatgcactgtccacactactaggtgctgcagaagatgtaaaagaagcccaggttttcctggctttgctggaggaaactcattatcaccatcagcaatttaagaaacttgcaaatttctattaaaatgtgctcaccttctctgaattggttaactgacatccttcctacagggctgtcaattgatccctatatagaagagctacatgaactttacaacacctttctcctcactgctgacaggtgacagaaagatgctgagcttacaagtcatcttcatgacctgacttagagaagttttgatctggaaaagtgctctgctagtcaatagggtgaggtacagggtcttttgaaaccccaataaacgtgagcgttccttgattcatttggttctctttggtgagtttttaaatttaggggtgggccaggcacagtggctcacagctgtaatcccagtactttgggaggctgaggcaggaggatagctcgaggtcaggagtttgagaccagcctgagtaacacagcgacacctgtctctacaaaaaaaaaataataataacaataaaataaaataaataaataaagaagaagaaagaaaattagttgagtgtggtgatgcacacctatagcctcagctactgaggagggtgaattgggaggatcactcgggcccaggagtttgaggctgcagggagccatgatcatgccactgcacttcagcttggaggacagagtgaaatcctatctcaaacataaataaataaataataaatttggaagtttgtgtctgtatgaagcagcatgggggtcatggtctctggaagcaggctgaatcatatttagacccagcctttgccactgaccaccctgtggctctggacaagtcacctaacctctttgagcctgagttttgtcatctgcaaaataagtatgataatggcatttattttgtagggttttttgggattatgcaaatggttttcagctagtgtgaggcacagcaaaactgcttgtttagttttatgatgaatcataaaatggggacattaatatccacgtgataggaagattgaaagaattaaatgagataatgtatgcacagtgcctgctgcacagtatttgcctaataacaataaaactgatagtaataataatatgaactaacatttatcatgtgcttgctaaattatatcttagagactttataagcatcaggagtggctgcatcattattatgattttgacatatggctgtgtattgggacatttgagacagctagtctttcagagatttgaggactggcatgcatttgttcatctttgcatttccttcctgtcctcacaatattctgcctcttccactccccagtgttgttaacagcagtttccagaggtgtttcagggaacaaacaaatgcaagctgtggaatgaatgactaatcctagatcacggaggagttgcaaaggaccaaccctcctgtttcacctctcaaggctgtcttcaatttgaggagggaaaatcatttattgttctgaaagataaaacaagggaacctgtcagactatatagactgagtctttagaaatctttctttgatcatgaaactcaaacccaagatgaatactggaatggggagcctatgtttgagctttgcaagaaccagcccaggaggaggttgggaacctgtggagagacatctgctcaacagagctctgctctctgttctcttacctcctccctagggattccattaccatgagcttgcctgatgatggatcacgaggtgccaaagatcaaatgaggatggcaggaaacacaaattttaaaccctaatgccaaatcataaactaagggtgtcgagaaaaatattgctcagtgtgatgacccttcattgccttttagacccaatcaatgggaactgatcacaatttattaattcacaactatgagaaagattttctggctacaaagatctcagagatagctcgctgaaatggcagagcatgagctttggaatcctacagtcatagatttgagttctggcacggcactaaatagttgtgggactttcaggaagctcctttaacctctgactctggttcctcatctgtagagcagaactaaagtcatccctccctccacagggttgatgaagatgggaaggaggtgctacatgaaagcgccttccatggtgtgctacacgcaaagatgagatctagacccctcgtggtgttctgtggtggtcttcttcgctagagttttctgattctactttcactttctggcaccagaactgtgttgtaaaatctattattttaatgacattgtttcaatagtttctctattatatgtcttttcttggctagaaagagcctttcttgccctccctccttgtccctcatctactcacgcccaaattctcttcatcctaagcttccttttggcctttcagggactaggacttcatatctcctgtatgttttgtgcaatatgtgcataacagcttccctgcctccattctctttccactgtattactaaagtacatatctggtcatgttactgaacttctcagtgcctagagaatgatacctaaccttcccggcatggcctccaaatccctcctttgagaaccttctttgtttagtgaattatctcaataaattattttggttggggaaagatattctttggagaatgaccaggatgaacttggagggtgatgaagaaataactgcttggtaggatatggacagagttttagagcttaaaaatgagcagagcagacggtgaggttatgggagaaaggctgcccatccatggggctaaaagctggtgccaagaagaagagagggttggtggatgttccctaaaggcagagagaattggagtgtcctatattcaagtgtgagcttgctgtttgctgggattgactgtactatatctcccatctctggtccaaactttccataaaagtctatggcacacacaatcttgcattactgacgcttttttgagatgagtttgataatgatgataaagaaaggggacagcaggtaggaggtaaaatgcaaagtggaaacagagactctgtagaagcagagacttagagccagaatagtgaagtggaaggtcagcttcacaactccctagatttactgagggggaccttagatcttcccatcgtaaattgggaatcagaaccaattttatttaaatattgcagaaaaaattgacctcagcaaactggaaggcttcagggttttgcatgccttatagatgtggcagtgacagccagcttttcctttccttcctatcaacagaattctgtaattctggagttggcaatatacccatttagaggactatacttctcagcctcaatggctgtggccagatgtccaagtttaggccaatgtcagtgggagaaatggggaaggacttataagaaagattcttgaaaagaggacagaaaggggccaggcgcagtggctcacgcctgtaatcccaacacttagggaggtcaaggcgggcagatcacctaagtcaggagtttcagaccagcctggccaacatgatgaaaccccgtctctactaaaaatacaaaaattagccaggcatagtggtgggtgcctgtaatcccagctactcatgaggctgaggcaggagaatcgcttgaactggggaggtgtaggttgcagtgagccaagatcgtgccactgcactccagcctgggcagcggagcaagactctatctcaaaaatgaaacaaacaaacaaaaaaagaggaccgaaaggtaaggaatcacctgccccaactttccatttttctttctgccttctggaactcagacatactgactggagctacagcagccgtctttggtcttgagtcatcttgcaatggaagccaaatgtctgactggcacagcagaaaaataaaggggcctctgtccccatgtctgagaggccacaagagcagcctctctccaggtttcttgtacacaggacagaaatgaaattctcccttattttggtgttttgttgtctgcaattgaatgtaatataatctgttaatacagtagcagagtagcagaatgattaaaaagtgagctctggagtcagactgctttcactccattccttacgctgtcacctcttaagcaggagccttaagcaaaggagccaaacctttcagaatcctctgttttctcatctgtaatatgcagtaagtgtaacaccacttgtcacatatggtttttgtgaagattaagtaaaataatgggttatgcacttagaactcttttggtacaaagtaggtactcaataagtggtagttgccactatgaccattacattgttatgactattattgccatagtcacttatcagatttagcattcatctccatcaatgagcaatgggacccaatagcaatgggtcctttggaaatagagaagaggcaatttcttgcctatttttggtactgtctcaggactgatacatggtaggagcccaatacatttttactgaaccttatcttattagatttttgccaaacatttcttatgagtagatgacaaaaattgtaagtattgtgtaccagggaaaggactgatgctgtgtatgcatactgttgttgaatccttaccaaaaacatttgggaaatgggcttgaagggttattatagacagtgtatgaacttaggagtgattcagacctatattctgtttgaggaacaattttaataatgttaaaagaggactggatataaatttagaaaaaaagtttaatctgcctctcttccactactcaaataagagcctcttggggctttgaatggctggatgtcactggcacgatggctttgctttgtttcatccatagccaactacattagagaacctctgtaaaccatcctgcctccacccttcagtctctccaaaaggctgtaggtgggaaccatgatgaaaagaaacctatttcctctatctagtttatacaatctgcaatatacaaaagggcttttaggtttggcatggctatggggtctggttgtggcctactgagctattgaagagtagataagaccttttggacaaagcacaagctgcttcctctgataagttttcttccacctgtgacagggcagtgggcaattataacgttggggcaggactagtgggaggagcttggcaagttgctataacttcccagcttgacaaattgtaaagaaaatagattgctctgtgagtcagatttgtttcatgttataagctggtttgcatagcatggggaatggtgcggcaaggccaaaaactctcttaagattgtgctgtccaaatagtttccattatgttggtgcaaaagtaattagaattagaattccctggggaactttaaaaattccaatccctggaccaattgaattagaaactctggaggtggtgcctgggcatcagtatttttaaaaagagataaacagaaattgaaagacacgccacaaactggagaaagtatttgcaaaaatacatacctaatataggacttgtctctagaatatataaggaatgcttaaaagtgattaataagaaaataaagaacctaattacaaaatgggcaaaagggctaggcgtgggctcatgcctgtaagcccagcactttgggaggccaaggcaggcagatcacgaggtcaggagttcgagaccagcctggccaatgtggtaaaaccctgtctcaactacaaatacaaaaattagccatgtgtgatgtcatgcacctgtagtcccagctactcgggaggctgaggcagaagagtcgcttgaacctgggaggtggaggttgtggtgagccgagatcgtgccattgcacaccagcctgggagacagagcaagactccatctcaaaaaaaaaagaaaaaggtggggggtgggcaaaagatttaaatagacactttaccaaggagagcacatggatgacaaataaactcatagaaagatgtccaacatcattagtaattagcataatgcaaattaaaaccacattgaaacattgctatataccttttaaaatggcaaaacaaacaaacaaacaaaaaacaaaacaaccatgaaaaaccacacctaacaattctgagtgctggcaaagaactggaactttcacatattcctgtgcaagtcaaatataatacagctactttggaaaaaagcttggctatttattataaagttgagcattcacttaccatataaactaacaacttcactcctaagtacttacttgagaaaccacaacttgtgtttatataaaaacctacatgtaaatacttgcagtgagtttatttacatcggccaaagactggaaacaacccagttgtcctccaactggtaaaaggataaacaaatggtagtagagccatacaatgggatactactcagcaagaaaatggaacaaccttctgatacacacaacaacatgaatgaatttcaaatgcatcttgctaagcaaaagaaagcaaacttaaaaggttatatactgaatgattctatttacataatgttctggaaagggcaaaccgatagggactgaaaacaaattagtggttgccaggggctgggagtgggaggagggattaactacaaagaggcagcctggagaaattattttggaggtgatggagctcttctgcatcttgattgtggtgaagcttacacgattatatgtgtttactaaagctcatagaagtgtatataaaaaaggatgcattttatgatatgtaattataactcaataaaactgaactccaacatccatttttcattattacagaaaaaaaattcccaagtgatttaaacccatagccagggttgagagttgttgacattatctctcaacctatctatcaacagatttgaatgtgggttctgtcatttaaacttcggtttacacattttccacgtatgtgaaattggagataataaaacctactttaaagagataaagagttttaagggccacactctctggaaagcacctaatttagggtttggcacaaaataataaaaaccacttatttagtgctatgtgctcggcaatgtaccaggcaattaatatgcatctcctttagtcttgacaacaatcctttgaagtaggtattattatttttaaagtggagaaaccgatgttcagagaaattatggaacttactcaaggtctcacagctagtcagtggctgaaccaggtttcaagtctaaactgaatgttattgattgctatactacttctgaaatctttatttcaaacatcccactctttatcatttccatcacttcctagctttctgtctaactttcccagtatttttattgcaatgatatcttgacctgattgacaattccaatttctaccgattccaccacttttcatgagtcatcgtcactcttgtgtttcacttcccttcttattcagcctagattatgtgattcagcacagtttagtcttcctttgaaaacactcttaaccccattacttttttctccctctgcttggaaaaagttaaatctaagttaatctcaactttctctttacttcattcttgcaactaagcagcaattattgctggagataaatgtgcagttgtggagactggactcaccctcaggtgagccaggttttaattaagaccagaaggagaaaaggaccgtgtatttaaaaggatgaagatataggagagtttgattattgttgtatggagaagcagtgggaagttttgccaaaggtgaaacaatatggggatgatgatgtgaaagtggaaaaaagacactggagcagcacttcctttagtttagtgaccaacaatcataagagtgagaggcctgcttgaagaaacctgctataaatatgctaacattggcataagttatgatattttggtcctggcctgactaggggctctgggaggattccaaatggcctcagtggctagataagtcagtcatacagtatagagaagtgttatgtggagaggaggaatcctgttttggggagaggtagggttttttcttcttgtgcttggtgctgtggtgaaggcctcaattactgggcaggaccagggtctttagtggaggtggcctagtgatgtgctggtaaaggtttaacaactaattctctgaacaatggtaacaacaacaaacacataggccctccatagctgatgccaagttaacagcatgacatcattgaatgtaaagctggaaagaggtatgcaccattagtactcttggcagctggtgtgagctggctccagcataacacagtctggaccaatttcaggctctccatgtgagcagtggaaaagtctagattatatactgctcatgagcactgtgatgggggtaggtggcaggctctggtttccagatgtaatgtatcctgtgaagaataagacacaggtaattcattcacaaaaatcactgtggtctgggagactgggtcaaaatggatgagatctattgaaaactgtgtagtcttcattaatctgatgcactggccctgtgccttctgtggaaccctttgggtatatggctgccttttgtcctactatccacattttgttccacatgataacatgtttagatctagaaactcatggtgagtcaatttctctgtcaaaaaagtttggaggtaattgctatcacattaatagaattgcaagtattcccaaaattcatccatgtgagtaatttattttcatcaataggagagaaaactcctcaattctgaagaaacctcaactattagtgtattagtgcttatgagaggataacttcaggagaaggggataaatggtaaaaccaacaggaaagagaagacatgacaggaggttaataaactcagcttattttccttatcaaattaaagagacgttaaatacaaaccagcacactttctggttgcatgcttgtagtctgtctttgtgtcctatgtgagcactatttattctacacgtatgatattaatgtaatgcttttcttatgatagcacgcattggtacacagaattcccaatataagttagaattcccacttctcctgaaatattcgaagagaccaagacatttgctgtcagtacatgggttggcccacatgatctgccaccctaaaacccagaaaagcctcatgcttttgcaaaaagccggaggttttcctttctcaagttgtccattggcctactccagcaattctgggaagataccgtagattgctactcaagagaaaaggaaggaagaggaaaaggcaataggagagccatttttacaaagtatcggcatgtgagtccttgcaccttatttttaaaaatgagttttatgattctttctcaaggggagacaaggagctgctagtggacctgtctctgtggactataaatctgtggaggtgtttgtggcagatggcgcattgtgattctcacaagggctttaaatctcctggcctggcttccttctccttgggggctcgatgccagtttgaggtttatcaaatcccaatcatatcagatttactgacttgtcattttgctgctctgcctatctttattatttatatcttagctgtatccttccactgtccctcaagaggattgacctatcttccggtgtaaaggagagttaaaataaaaacagagccattagaacgtgacagggaatgagaagctgggaggtgtatgagaaccagaataattctctgtattgaaaaaataggccgggagcggaggttcacgcctgttatctcagcacttgccgcggccgaggcgggcggatcacctcagcctcccaaagtgcggggtcaggagtacgacagcagcctggccaacatggtgaaaccctggctctactacaagtacaaaaattagccaggcgttgtggtacgcacctttaatcccagctactcaggaggctgaggctaaagcagaagaagcgcttgaacccgggaggtggaggttgcagtgagccgagatcgcgctattgcactccagtctgggcgacagagcaagactctgtttaaaaaaaaaaaacccagaaaacaaacaacaacaacaaaaaagaaggccaggcgcggtggctcatgcctgtaattccagcactttggaaggccgaggcaggtggattagttgaggtcaggagtttgagaccagtctggccaaaatggtgaaaccccgtctctactaaaaatacaaaaattagccgggcgtggtggcgggcgcctataatcccagctactcagaaggctgaagcaggagaattgcttgaaccaaggaggtggaggtttcagtgagctgagatcatgccactgcactccagcctgggcgacagagcaagactccatctcaaaaaaagaagaaagaaagaaaagaaaaagaaaaaaaaaaaaggaagctactataattaagtcaaaacctggccctaacctccctggcagtcaaggcaaaaaagagcatgatgatccacttttctgccacttcatacatctcaccactaaatactccggagaaaggggatgaacagtgaccaggctggtaagcacactttccacagtacttccctgcatggagacacttacctgataatatggatgcgacggctgcaatgatgaaggacacaatgacaccaggtcctgccatttccttggccaccaggccagagaccacatacatgccagtgcccacacagctgccaacgccaagagagatgaggtccactgtggtgagtacctgggctagcttagttccatgtgccgtggtggtcccagttccctctagcatggactccactggtttggtgcgtaggatcctggagtgcattgcataccaggcagctccccactgcacccgccgggggtccagcgaggtgaagaagccactcatcttgagcgataggggatgcagtgaaggtcagctgatggaagggggctacaaagccttagtggatggttctggaactcatctagtgaacagggatctcccttttaggaaaggcccagagggacccagtgcagccttctcctgggcatgaatgtctgcaggaaaaacacaagaaagcagaagatgagaccgagtgagaaacaaaccttgacttgcggggatggttggaggttaatgtcctgaactggtagaactggtctacccgtgtgctcataacacggaagggttccatggttccactctccttgctcttctctccagtcctaaaggactgccggcgcgtgcactgtgttgcacagtcatcctgatgaggatggtctgagttagagctctgccacttactgctctgtggtcttgggtaagccatgtctgtgtttcagtctcagctgtccaatgggacaataaagtctctctcctagtgttgatgtgaagattagatgagtgacgtccataaggagcttaagaaaatgcctggcgtatggaaagtgctcatccatctcaactctaactacctcttactttgccaatacttggtctgtgattcttgggcatattttgaggggacatgatatctacatgttttttaacataaaaatgtaaaattagatccatgagtcttaagaggggccatgccaccccatgggttattttggcacttggctcccaaatgaaataaaaaatgttttgggaattttttttactctcaaacattggaatggtggggagtactcctggcatctggggggaacctgagatgtgagttgtgtaggatgttgtcacacaacttttagatattttgcttgactttcctgtagataaaaatcctggtgatgatgatctgagcctgtcaactcactctcttttacatataaactcataggatattttggatagccttaatatacaagtaaattgaattttccaggaatacaactatagaataaatcaaaggaagattataatgtatttagtttggaacttaagaggagttgtttgccctttcagaaaaccaaggaccccatgggaatgccacccgtggtattgcatttctcatgctgcaccctggaacagcctgccatctggaactggcacgtttgcggtgatttttcacatagtgcaagcatttgacaccgtcatttggatatgcctgggtatttacacactgaaatatgttgtatataggtagatgatcaataatttcacttcaggatactaaaaggaggtatgacaaagtatttattataaaaaggggtgttggatctgatagaattaagaactacagtgttaggtaatttctaaagtttagtaaattaggaactgcaaatatatgaagctacattctttggaagccggaagctggagaaaatttataaaaactgtataaaatttataaaactcataaatgtatagaatttttgaagtatagccagacgttgattccaaatactgtactgacaagctcaggacatttatataatcagtaagtacctgcctacctcatctactcatagtattaatgaatactaagcacttaatgtagcacttgtctgcttctaaaggcttttcaaacgctaattagaagaatcaggtgaaatgtggctgtttggttcacaggtttgggtgacagcctttctggtttaattttttcctagctttgacagtgtggcttcgtgctgtgtttttattcttgacaacaccttagatatcactatagttggataacacgccagagatatttaacaggctagagtgtctgcattcctcccttccacgtccccttcctcctctcctctttcttcttctaaagattttcgtattggcaagaaaatataccatatgtttaccgagaaggccgctagaacaactgctttggttgaggtcttgtggggacatgaatccacgtgtctatttatttccactcagccagcatataaggaacacctgttatgtgccaagcatggcgtgaggcttgtagatgcaaagacatagtccctgctcccatggagcttgcagcctgggatgagagatagtggacgccaaatcacactgcaagtgagagggtttatttttgtttttccctgaaaagcttggcctttattatttctctttttacacaaacatcgcatatctattgcagaaaagtcagacaatataaacaacaaagaaccacatgagtaaataagataccacccagctagctacaacttgatttatattctttcagacccttttctatgtaactacacacctatttgaatggacatatatatatgtgtgtgtgttttataaatgttatatcatttattctgatttgaaactttcttgttttgcttaacaatatgttagaatgttttcccacatcaatagttatggaaacatcatttttaataactgagtagtagcttcactattgtggcttcagtgtttttattcagaaaattggcctgttgctttagttttaattcatccgttcaagaaactatacaaagcatcttctctgtgtcagcccagccttaggtagcagttgctgtggcaaatgagacattcaaagtcctgctgtcatggtgctgacgtttggtgaagagggaggaggcaatacacaggctgacagataaaatcagtcagtttcagagagggatacagactgtgttatgggctgaatcatggcccccccaaattagaatgttggagtcctagccaccacacctcagaatgtgactgtatatggaaataatatcattatagatgaaattagttggggggaggtcataccaaagtagaatgggcccttagtccatatgactgatgtccttataaaaaggggaaatttgtaaacaaagtcacacacacagggagaacagacatgggggttatgcctctacaagcaaagggatgcctcagattgccacgaaaacaccagaagctagaaaagaggcagggaacggattcttcctcatagctctaagaagccaaccctgctgacaccttagtcttggatttctagactccagaatggtgagacaatacatttctattgcttaagccacatggaccgtggtattaggttggcacaaaagtaattgcagtaaagcacaaattgcaaaaaccgcaattacttttgcaccaacacaatactttgttatggcagccctagcaaactagtacaggcttagaggaaataaaatgggggtgataaaggggtgggaaggtctctgtggacatggcattggctcctgagtggtgcaaagaagccagttgtaccagatgtcagggaaatgctcctcacattgtggttcaagaggatagagcgggtgttgcatctgctgggatctaagtgagactggtatggggtaaggaggaggatttgagtgtcgtgttgactaattaaatcctcacaacatatctccctttacagatgaggcaaagtaggccgggagaagggcagtcacttacccaaagtcaccagagccagagcttggccctgggctccgtggggctctcttgcttaagatgcgcagaggtcagactgccagggggctggtcagccaagataacagggatgtgatttggatatttagtgcagtgagaagcccttggaggcttttattcaggtgagcaatatgagatgacttactttctaaaagctcattgtagctgcggcagaatcttgggccctgggatcctttaaggcagcccgggatggatgtaaaaaggcgaggggtgtggacctgctgcagcggggaggccgacaagtaagcagagatctataagccagtgggactctgcagccagggcagtgcctgtacacaggacactatgcaggagggagaaaaattgtcagccggctccaggagaacctcacaagctgtgcgctgctggaatcgaggagagaggccctgcggcaggttgtggctgtggtaaatgcaggtgggcttcatgcccgcttttgaggggtggtgaatggtttcccatcttgagacccttggcagtggctctccatcttggttgcacgttggaaatacccaaggatctttcagaaatgctggtgcctgtgccccatccccaaaattctaatgtaatttgcctgaagtatggcctatatacaggggttctttaaatgccccagcttatgctagcacagcagaattgaggttccctgccccatgccaggcataatgacaaatgctccgtgtggaaaaccagatattgctgttttccacaggaggccactactctgacaggtacttccggtttccttccctgggcaggtcatggggcctcttaacagctctcctcggcaggcaatgactatggaggcggcactgtctggagatatctcctgggctacttgtcctgttcagccttcatcagaaactgtcacaaggacaccgagaaacaaaccagcctttttatgaaagtgatggcttctatttgcacttcgtattcctggtaattagaaaccgtattgaaaatgtggagaatcaaccaaaagcaaaggttgagggtggcaagaatgccccctggtcctattctcttcacgcaattcccctgagtgcttgctttattgatgcaaacagggagttgggaccatttcctttcttggtaggaaatgtactggagagaacaaaatgtacaaaagaaaacatgcttctaggtgactattggcaatatccatattcattacccccagattatgttaatcaaatatagttttggaagctcattgctgttgtctttccaagatgagcaataaatgtgtgttgtgctttctctagcactttaattcaggtttctcaaaatacttcacagctataactaaggaaggcttacagggcctctgggagaagagagtcatcattgtggtgcttgctggcatgctcgagggttcagtgggctccaaggataatgatgataaaagcaggtttgtttcaggatgcaaataattacagttgagtagttcactgaatgagtaggattatcgaattaggctagagactgcctttggaggtgaggagaggaaggaaacgaaggctaacaaaacagtaaacagccagtaatcattcctgcctgattttgcaaatatgctaagggactacaaaaatccctcatgacacactcgatgagtagttgtccagctttttctggaacatctgggccgcagggaacattggctgatagaagcagccctttcacgtggtgggacagttaggattgctacaagattcttttaattgatgtccccaggaaaaatgaggctgcagttagagtaaacgttgcctggttttctgagccccacctggtgactgtgggatctgaggacccttctgaggtctctgcccactcccgcatccaggtcttggctaaccctctcaccacctccctgcttttcttcctctgggctgagctcctggctctgggttaagaacacaattcaggaaccaggtgccctgcatgcaaattctgcctctgcctttactaactaagtgaccttgggcaaacctcactatgcgtcagttttgccatttgtaaaatgggatcacagtggtacctagctcacagggttgtggtgaggagtggaagagctaatacgtgtagagcttttagtaccgcgcctggcgtatagtgcatgctgtgggagcgttagctagcatcaccctgctgtggcccctgaccaggtgtttttttttttttgttgttgttgttccctgctactgacacccttcccaccaccttcacctccttaggcagctctcagagggcccttggcctgatgccaagtccttaatcagggcttttttctgttgaacctcccctgggtttctcctggctgcagcctgtgcacctggtacttccactccaagggattcttatttacctttctcaaacttgtggagaacggctttcctctttcctgttttcctttatctaaaggggccttcagcagatttgcttaggcctttgggtgttatgcctcctctcattcttctatacttttgacttttttccccaagatgcacacatacctttgggatggctagaccatggtaggttcaccttcagttgccaccccatccctgaaaacatgatccccttctgacttttatgcctgtggcttactctggctcactcagctagcataagctttgatggtggatcctctcctgaagtccttgctcttctactccttccaagctcaccagatacggctttatgtttgcaccataactggggatgtgcttgcatgtcagccactctgactttatactacgtggccaggtacaggccagatgcgtcttaatctcagggtctgctcagctctgacagaatatcctggtaaactgaactgtgatgtgtgtcccagtaactctcttctgttgtctgcagttttgctctctgtatctatacagattagagttaatctgcttatgggataagtcttcaagtttttgatagcaactaacatatatcttggagtcttatctttcctagactaaacatcttcaatttcttctgcgatcaacagtgcctcacatgttatagcttctagatcaaccacattctgatttgtacttcttgaataggctgcagcttatcatggttgacacttttggaccatgacagagtggtaagggagatgtttttgatccatctggcccagtgtgtgtgtgtgtgtgtgtgtgtgtgtggtgtgtgtgtgtgcacgcacacacatgtgtgcacaagcacgtgcctcttaaatcatgcagtgttggtgcctgacaaattcacttagatgtacgattggctttaaaaccagggttcctgattttcagatggctaattttttcagttgtatctttgctgagtgtttgatcaaacccacttcaaatattttttgattacctaccatattatttaatgatgtgctagcctgtttatattgtatgtggagtctcagacacagccaacttcgttttacttggaatatctttaaaggggactatgaatctataatgactgcatattttagctatgcaaataagattgcaccaattaagcttccttttcaaagcttgttggttttttttgtttgtttgtttctaaaaagttattgagtatattaatcagcttttgctgtagtaacaaacaaccccaaatttgaatattacaatggtgatgtttgtctcttgctgtggctgtactccagacagtggatcggcttcagatcttttccccaatctggactgggagtctactccacacgccttcttattccaggattcaggctgaaggagcaatccctatctgatgcatgctgctctttcgtggcacaactggtggaaatgtaaaatgtctctactgcttgtgctgggaactggcagttccactgactttccattaactaaagtaagtcatatgaccaagcccaaagttagtggggtgagaagtgtcctcctcccattgaaggcaggtgagtcacatggcacagggcgaagttgtgcacttttcttatgaaggaggatgtaaacagttttgatgatatgtcactgatcccttactatgcactaggcaaagcaattatatttttcttctgaggctgttttctctgaaatgggcagatatctgtacatctgaggaagaaacttaagactctgatgtgttcattcctgcatttccacaattaattctttaaagatataaataatgattgcctgtaaataggtaaattaaaaattcatctgcttccaacaccaggcagaacaaaataaagagaaacctgtttaattttgtttgcttgaaataattctttaaaaaaaacttatgaaaacaattgatttttacctggtctgggacaatatttctactgacacaaatagtttcccattctgctcccctgtttgtcaacactccagagttgcgaatactctctgtgtatatatttgttggaaactgtggtgaaaacactctcaagagcatctacttggagaaggaaggataggcttgttcagagattggttactgagcgttgagacaccacgtttctccttcgatgccccagtcagggagggtatcacagtttgacatcaccttctcctctccttttccatggacctcaggtccggtgcctcaggtctttgcttggggctaggtgtccttgcatgtgtggccacagtctggcatcaccttccactcttctcccgcagatcagggtctcccaggttagggtctcaggtctctgcttggtgtcatgtgttattcattgtatataagataatattaacaaaaccagagttcaggaaatgaaaaactcttcattaatcagatattactgggaaacctctctgttagaagggacaaataataccaaaaaccagttaatccttctatgccaccataaaagatttaagaatttgtattaatcattgcaaaagtatttaatgagttcccggtgtgtgtttagttcaatggtagctgttatggccataaaataaattattgtaatctacagaatatcaggaatttaggcacaaggcagcttcagggagtgcgagtgtcctttgcttgtccttccagatccacccagcagcccactggctgtgtcctggggagctgacatgctcccttgccctctggttggattggtcaatgggaggcaccagcaggtgatcaggaggatggaagagaggcaggccaggtgtttatccctagcttccctttgccaggtcactgtgggttggctgtggctccagccaggtggccctctccacatagccctaactctctctggttctgataattctttctttatcccccctgtcatttcaggcagtgggtagtactcatgtttctagcccttggaactgcattttgcctcatgatttctctgcccactgccctcatctttatatatattaacagttcttttcactaactttcctcaaaataccaggcttgagtgtgccacgtgcttcctgctgggatcctgactgatacatgggtatattagacggctgagatagattcaggaaatcaacaatacccgctgtgtctacagagatactgggtttgaagtctgaacagtgaggtctgggctttgactctgctgtgtgaccttgggtttgtatcttaaaatccctgagcgtcagttttattatctgaaatacaggagaaataatagttaccttgtaaacctgtcatgaggatttaatgagatgatgcttgtggatgcagtttggaaaccacaaagcaacctataagtgtaggtattgaaaatgtgaccaatgccccaaatatagctaagagaccgtaagagacttggtaattagcagaagtagatcataagctgtttgcaatgctttgcttgccaaagaagaagagtgaaccataaaagtttagaaaaactttgaatggaagactgatatagcaatattttttctggttcatatttgattagccagaaaagttaattagttagaacatatttcccaaaccttccagttacttggagtttaactgcatacaaaagttattgggaagtctgatgggcccataggtcatttctaaatacatgcagatttccaaaattaacactgaaaagtgagagcacactatcataccatgaatatagagtgaatactctgtactcatgaatcaggagaccggaggttttgtcccagtcccgtaggacaagctatgggtgagacttgagtaagccacagcttgctaaggtttctattttctcatttagaaaatgttgatagggactttttaatgcaacactatagttgcaaagtgtactcatgagagatgcataaggtggctttttgcacaaaaattctggtctcctcatcccaaatgtgattgtagaggccattctgaaatgatgagatcataaaatatttgtatttgagatcatccagcctggcaccttcatgccatgtgtaatctgagcccccagaagacaatctgcacccactctggctggatgcccatctcagcatgtccttacactcaagacagaacactaactggactcctaagatactgaaggaaatggaagcctttctggcaaaatagagaaatgctatcacatatctcacacaattccctcttgtattaggtccctctggctgctgtaacaaatggctacaaatgtagtggccaaaaatgacagatttgatattttacagctctgagtctgcagggctgtgtaccttccggaagttccagggacagtctatttccttgccttttccagcctctagaatttagaggtcacctgcattccttgacttgtgattctttccttcttcaaaaccagcaacatagtatcttctctcctctctgatcccctgctcccctgttctaaggatccttgtaattatatcaaatctattctctaatccaggataatctcctcatctcaagattcttaacttaatcacctctgcagagtcccctttgtcatagtcacaaattctgaagattagaacatggacatctctggggaacattattccatcttctaagaaccactcttatcttagacatgtctctcttcgtatttctgtactctatggcaaactgccacctctctcatctctcttttcctgaaaacactcggctgagcatttatatgcttttggaaaaattctgtccctaattaaacaaaaacttaaccagaactacatgtacctattgtctgtcaagaatactcatggtagagtcatttactcagctgctttcagaggagcagcttcagagcctgagcgctgaagtggtttatttgaggccacacccaagtgatggcaggtgtcctgacctccaagccagtgctttccgtactgctccgtatttaaaaaggtgaatggagcagcctatattttctgcatataatgttatcccaggcttgggataatctccagaggagaattaggcatttgcctagttgtctatatggtcgtggtccttctaaacatattttttttcttgcaggatttgagggaagaaagatgacctaatcttgaaagtcttcctagagatttggcctcaataggaatttcctcatcctgatctggagaagcccaattctagcagaagtctcctaaatgaacttgttcacattagtattaacaaattggcttccccagggttgtgcaggaaaatctttaagtggatgcatctctgtagctactcactctggatatgctaaatagagttgtccatctgagatacttcctccccagtcaatagctgcaatttggatgactgactttgtgcttctgggtttggagcttatatctgaaattacttttgttttctctattctctgtatctttacccacagccaggcttctcttgtacttcagattttgctcttgtgggggctggccacctgtttctttgagatttatttcattgcacccaaaggaaatttctgtttttaaaagagtctgcattttaagtcagataattccaactagacccttcaaaatgtcaggaactgccatttcatgtaatacaacaataaatggaccaatagaactttaattttgtcgatatacgttattatacatgctccacaaattttcagttctcaataaagcctgactccaacacacccagcctcactctactcttggctttactgctctcagtacacaccatctgcagtgaatttctgtaaatatggagcacctagttaatgtctgcactgtgtgtgcaaaatgtagaggcaaaaagaagaaaaagatagcccctgccctccaggagctctcaggctggcctgcaagatggacaagaagtgagtgaccatccaatgtgatacaaggaagtctccccactgaccataaagattcccacttcttagctcctcttcctgttttcctcacctttttctctgaagctattcacatttccatgttcctttgggactcagcttatatcccatctgtcattaaatgtgtgttaaccactggagcctcctcttctctgatttcctgtaggaccctcaactcaacgtgtattcgtcaattgccttgtgcagattgttaaacacttgagagctaggatctcttcttaaagccctccaatggttttgtatcgcaaatgaaatgaaatccaaggtcctcaaaatgtcctccagggccctacataatctgatgtctacttcatctccgagttcatctcctaccaccctccttggttcagccacactgacttcctttccattcttgaaatacatcaagctctctgttttctcagggcctttgcacttgtttcttctatctggaatctcttgccccaggtctttgcatgacttactcttcatgcttccagtctcagctgaaatgtcatctttgcagagagaggtcctcctgggccacctgagctaaaagtggccctggcctctctgtggtctcttgtactcttttcctcattatctgcctatgtatctgtctgtgcatctatctatgtatctacctatctgtgtatttatcagtcatctatctgtgtctgtctatcgtctatgtatccatctattcacttatttacttatttatttagtttcgagtaatttatcttgatttgacatttaattgtttatatttttatgtctgtctcttccctctagactgcaaactccttgaaggtaggaattttgtatctaattatagataaattatctctatttaaaaatcctcttatattcattaagttaagggaaacacgagtttaaaatctacaatatcatatagtattttccccttatctgcaggggctaccttccaagacctccacagtagatgcttgaaactgcatatagtactgaatcttatatatacttaaagttttttcctatatgtacatacctatgataaagtttaattaatagattagccacagtaagagattaacaacaataactaatattaaaataggatacataacagtattctagcatcactactattgtactttggggccagtattaagtaaaataaggatgacttgaatacaagccctgtaatacaatgtacagtcgatctgataactgagatggccaccaagtgactaagtggcggggtggggggtagtacagagtgtggataccttggacaaaggaatgattcatgtcctgggtgggacagagtgggatggtgtgagatttcattatgctactcagaacagcatgcaatttaaaacttatgagttgtttgtttctggaattttccatttcatatttttggacctcagatgaccatgcgtaactgaaaccatggaaagcaacattgtgaataagggaggactaccataatattaaaatattaaaatttagttaggtttagagctatacttatcaatgtagaagttccatgtagctccttggagcctcagtcttttacccaatcagagcagtgaaaatctcataaatcatagaggatgcaacataaaaggtatatttttgatttttagtttgcttcttttttttttttcatctggcaggaaaatagttgagacttttgacagtctgggaatttaaaacgtttttggaaaaatagagatttgcatcgcccaggagtgcactgttcatttctagcttctggtgtctcctttgaggatggtgctgcacaggccctcagggtacattttggatccatggtccagagaattcttctctgaggcaggttcctttcctatcatcatgtctttccgttaggaaatctgaaagctaggagaacatctttcaatgctaacagcccttgctcacaaaggaatgccagatgttgtctggtgactttttaaatgaatatccagccttcaagctattcaactgattagtgcttgcttctaaactgttgagttaaaatttttccagactgcaagctcttaagtttgaatgtattcctcatagagccaggtaaggaacaattgtttatgtgaatataaatattcaataatatgtaaaaatatatcagttatcactaatattcaaggaaatgccaagaaaaggagatgttttcacttattgacatggcaaaggttaaaaaaataaaagtactctttgctagtgggatgtcaaagaaaggatacatccacacagtgatagtgggaatataaactgatataaatgtttttggaaagtaactacatcatgtggaaattatcaggtgcagaaaaagatttatttcaagggcattaattgtaatattactcacagtggtaaaagttggagacaacctacatttctcaatatggtgacacagttaaatggattatcaggcactcaaagaataaaatattaagcaactgttaaaatattgtttaaaaataatacttattggccaggtgttatggttcacacctgtaatcccagcactttgggaagccaaggtgggaggatcacttgaggccaggagttcaagaccagcctgggcagcatagcaagatcccatctctatcaaaagaaaaaaaaataaggtggcatggtggcacacctgtagtcctagctacttagaaggctgacacaggaggattgcttgagcccaggagtttgaggctgcagtgagctgtgatttacacaccacttactccagtttgggtcatagagcaagaccttgtctccaaaaaggtaatgtgtaattacatgagaaattactcaggataaattaaaacaactacagcaataaaaaatatgatttaattttattctcttctaaaggcagtatggtaaaatgttaaaaatggggaatctatgagtggtgggattaggaatgatatctattagattggtgcaagagtaattgcaattaaaattgcaaaaaaccacagttactcttgcaccaacctaatatttttatcttttctgtggtcaggatctattcctttaaaatcagaaaagaattatgtaactaaaaccccaaacaaaacacagaagctcccagaataacgtgcatgctcctgttcctgatcatgcagaaatatcctcggtttttgtagttatgcttctacgcatctccgttacggtgaactgttttagggtctgtagcctccactgaattagatttgcctaaattatcattagctttctttccactttggagatacaattttttaggcctagggaaagctcttacttggttacagaatcagctttaaaacagcagaatcgaatcaccaggagccaagaggcaggattctcccagttgctacacaaagctcgagccaacatctttactggaaagatggaatctgcccctgaagcaaagacctcagtttcgtgacattggtttctaatagcttggttttctttctcctctcattgactctcccagaggcaactaattgtgttaatttcatggactgtcctaagaattctaagtatcctcaacaggtccatctcacaaaactagcaagtaaaagcacccaccggcaccaggccactctatagctactctctcctggactgtgtctgctctctcacagcttgtcaaccattggccttccccattctgcctcttgcatgtcccttgccactacagctccttttgctgaggtcatcaacagctaccattttgctaaatccaatgaacatatttcaagccttcatctctctcacttggcccatctcaagcactcagtgttgttcaagtcctccttcttaaaaagatttggatttcgtctcacaacagtgaaagccgtgggttgtgtgtgcatgtccacatgcaaggttgacggtgacctcatatcattcttttaggaataagctattctgattttttcttctttagtataagaagatttcaaaagatcttcggaaggacatgtcctttagaagatttttaatgctgctacattttcagtccttaacgtggtttctactactagatgaaatcacagagtgatatttagatgtgagtatgcagaggacagtgtgagtcatcatcaagaatccagtttgccatgatgcctagaatctctttgctgaaagagtgatctagaaggggaaagaggtttaacctgaaaaagaaatgggaaactctgcttgacaaacctgaacaagaataaaaatattccttaaagcagagggctagatggtttataaactttcaggtctatctggactgttgggtcatctttgctctttgagtcacgtgtggggttgacctgtctgagacagtcactctctcagatctgaagctcaggttgatgacataaaatccctgtgccaagccaggctgctggacctgctactattgttttatgcctcctccggaagagagggccaagatgcctagtgtctcgaaccagcccaaggagaggccattttactatgctctgcgttaaagagatccatgaggtcacggtccctctgtctttaagaagcacagtctccaccgggtgcagtggcttactcctgtaatcccagcactttgggaggctgaggtgggcaggtcacctgaggttgggagtttgagaccagcctgaccaacatggagaaacccagtctctactaaaaatacaaaattagctgggagtggtggcgcatgcttgtaatcccagctactcgggaggctgaggcaggagaatcgcttgaaccccagaggttgtagtgagccgagatcgccccattgcactccagcctgggcaacaagagtgaaactccatctcaaaagaaaaaaaacaaaaacaaaaacaaaaagaaccacagtctctccaggaccaagagggttgggaaaggggatgggctaaactgcattttctttctttctttctttcttttttttttttttttgagatggagtcttgctctgttgcccaggctggagtgcagtggtgtgatctctgctcaccacaatctccacctcctgggttcaagtgattctcttgcctcagcctcccaagtagctgggactacaggcatgtgccaccatgcctggctaatttttgtatttttagtagagacagggtttcactatgttggcctggctggtctcgaactcctgaccttgtgatccacccgcctcagtcctgcaaagtgctgggattacaggcatgagccaccacacccgggcctgcattttctatttagacatctgaagagtattttaataaataagcctccacattcggagcctagtattgagcgtgcttaatttgtattgcctgtcataggtgagagttggtagatcctccctgcctgtgatttgggtctggccagggtccccattctattcacttagtgagaaatctccaaataaaaaggggtgaactcctctcgggacacattacaggactgaaagagcctcatttttctgaactctgggtgtcactctgttgcaagcagaaaaaaggtaaaatagacacacacacacagacacacacacaaaagagaagagcctctttttgggaggctaaaaactgagagattaaaaggctatatatctgagatccaaattatagtgcttaaacaagcctagataatcctcgcctaaataacagtgtcacttatatgatgcttactatgtacctgccatgattttaactgatttatatgcagttcttgatttatgataaggtacctgataaacccatcataagtttaaaatgtcccaagttgaaagtacatgactgactgggacctgtggctcacagccacttcccagcattgtaggagaagtatggtttctactgaatgtgtatcatgtctgcaccataaaagtggaaatgtcattaagtagaaccatcttaagttagggctgtctgtatattctaacaacaaccctgtgagagagatactatttttaaccactcccaaggtaaagatgaggaaactgaggcacagagcagttaacatttgttaaaagtgacacagctgctgtcagagctggcacatgactccattcagagcagattagggactggactgtagggcagcactgtctagtagacattctgtgatgatgaaaatattttctgtgcggtctaatacagtggccactagctacatgtggctattgaacacttgaaatgtgtctagtgcaactgaagaactgaattttacatttaaatttaattttaattaatttgaatttaaatagtcacatgtggccagtggctattatactgtacagcatagctgcagagtctgcgcttcataaattttagaaacaacaccagaaaggtgtggtatcctttacagaagaggacattgggtgtcaggctagctggagaatttatccaagtctctgaagctagcattggaagagccaggatgccagcttccgtggccatgtgctctggtcaccagcagtgaacgcctcccccaacccctctgccatctactcttggctcttcatctctttccaaattggatctgaaagcctatcttttctccttcacccttatccagagtctttttcccttcctctattattaatgtagtaacaggagaacagtggttggtgatgaacatcatgctacatgtgtggatgatgtgggctgtccctgtagagtttaattggccaaattggaagagcttaacttggtatcaagcatatactcattcttaacatccttaagaccttatcccaaactactctttgctgtctctttcttcctattatttttccctccaccctaccctggttctcccatcactggtaacaaaacatatgccatataaacaaaagtgcctttggctaaaggtcctaaagttatagccacctcaatctttgctatttaattttaagtcttcttctcctgccaagaaaacttttcaattaggttcacattagctgatattattattaaagaaaagatatttaattatttatggcttgggagactgtcactttttcctaagcacagttttgaataaaccaactttatgttaactcatagtaagctgagcacagtgccttgtggccagcagcctcccaaaaactgttaacattttatggagttgccttcctctgctgccctttaatgacttaggacttatctgagcaggaaaccctgctttaaccactggacatgaacaaagaaaacagaagtgtatctaaccaagaaaaaccaaattgaaatactggtctaccaggcaatcctttttggcattagaagagaagaaattctgttactttgtcagctagcaggctgcccatctaatcacaaatggtgatcttatctcagctggagatgaagactcacccagctctcagacagaagcagacagaatctaatgttacctggtggagaggagcacaccaggatttccagtgacctggaaagtaggagtctgttggaaagcaggttgataaatgactgaggggaactttttttaggacagtgaaaactatgcagagaaagggcatttgtgttggggtctccttgatgcttccaatttccctgtgacacaccctggacttggtaggtctcaatggtgattgacccatgccagtaaagccaacctgctggtacttaaactatccagaaccttgatatagtgtttccatttccactgacttgtttaacgggaaaaagtttatatggtggtatgaacagagaaggagaaagagataagaaggaattttataatttctcaagatatgaaacctagcattgtacttttaaacagaagttcttcctgctcccaaacaatcagatctccaagctgcctcctggagtaatcccactgtcaacccatgctggtcccctgtgctccgactttcagagcaactgaggggaggcccttcatactgatggacagcttgccttagagggtgatttgatcagtctttcacgtctccagttattttttttctccctacagggtgcacttgaattggtattgttggtgagagctgtggcaccgtgaacaacatcacatgcaggtagatgatggacaggtcttcttggtctgtcaggccagtctccaagggctcacagcccttatacacattagaatcacctggggagcttttaaaaataataatgtccagccatatttccaagagatttatattgaattggtctgagtgggaacctggcatcagagacatcagaagccttcccaggtgattctaatgtgcagccatggctgggtctacctggatggagatgtaagattgtcaagacaccataccccttcccctctttcccttccttcttctccttttcctctctcttccttttcattctcttcactgtgtcctgcagattctatgagccaaatagagtagtttccaccttctgaagtggagggttttgttttcttttatgaaaagaaaatattttttatctcctataaacaaaaaatatataccaattgtaaataaagtcgacccttgaacaacactggggctaggggtgccaacccctgtgcagcctaaaatctgcatataacttttgactctccaaaaacttaactactaatagcctactgttgaccagaagccttaccaacaccataaatggtcaacacatattttgtatgtcatatatattatatactgtattcttacaataaaataagctagagaagaaaatgtaattattaagaaaataataagaaatagaaaatatattttctattcagtgaaagtggatcatcataaatattttcatcttcatagtctttgtgttgagtagtctgaggaggaggaggaagaggaggggttggtcttactctctcaggggtagcaaaggtggaagaggtgaaggaggtggaagaaatacatatcacaaaactgagatattattttatgacctttttaaaacctaatgtatcagcgatatcacatatccaagagagtatatgtcatctgtgtcatcttaaagagctgcaggattgttcattttatgtacaacgatggtttaattgccttttaatggaaattgaagctattctcattatttttttctcataagcaatgctacggtggacatatattttgcagacctgcctatgtaattccttaggctaagctccttggaggggagttaccaagttaatgggcatgcatgttttatgttctagtgccctttgccagactgccctctcaaaagattgtgccagtttcaccactcttcagtagaatatgtctttgcccatttccatatgaagaagtattaatttttcatcaatcttggtaatctttgaatttggcagctcccacaaaataaaaatacatttgtgcaatatgatttaagctacatttaccaagtgccttatatgtgctgggagctaaggataccagaacagataagccaggactcttccttcaaggttctttcaattctcctacccagtgcttctaggtattttaacagacattaaaaaaaaaatcactggaagtggagcctgtggcttaaataaataaacacaaacccacctgggaatcttgtgaaaatgcagtttctgcctccttaggtctagaatggggcctgagattctactaagaagcttccagaagatgcctctacctgtgctgcagttggtttgcatctagcagtgaggctctgccccacctctgggtcttcacagtagctgctgcttctgttttattcttccccactctttgcctagcttagttgttcccatgcctggctgcacttgagaatcaactgggaaacttaacaaaataaaagcacagatgcagctcctcaggctctttcatggagcttctgagtccacatctctgggagtggaattcaagaatcagtattttaaagaaaaccgttagaccatatttttgcaattcctggttaggctgctctgactaacccttcaggtctcactctgagcatcacttctcatctgtgaatgagtttagatcctatgtcaccactataaacttttattatagcactctgcacttttcctttggagcacgttatgtaataaattaattaattgtgtcattattcattagagtctgtgtctcttttagtttctgagttccatgaaggcagagtgtgtctgttgtgggcactgtagtgtccctgataccaagtcaggatctgctggtaagtaggtggcacttgggacatagaaataaataaatgaatagacataaaacactataaatattttcacatttgattatcatgagtctgtaagacaggaaatgtaggcattaatatcctcatcttacagacacaaaaagagaggtttggagagagagaaagtgactagttcaatataatacaggctgaatccagactgggacaccggccttcttctttttttttttttttttttgagacggagtcttgctctgttgccagactagagtgcagtggcacgatcttggctcactgcaaccgctgcctcccgggttcaagcaattccctttcctcagcctcctgagtagctgggactacaggcgcgcaccaccacacctggctaacattttgtatttttgtagagacagggtttcaccatgttggccaggatggtctcaatctcccgaccttgtgattgcacccgcctcggcctcccaaagtgctgggattacagacgtgagccaccacgcccagccttttgaatggtgggccaatcccctctctgcaatccaggctgctcctctatagctcttatataagcccaagctgaggaagtttgtttaaatatcgccagtgtgacacttatgaccgcagaaattaaaaatgctaacagttagagctacccgatgccctggggagaggcactttgcttgaacagtgacacgaagattgcatcctttgagaataaacaatggttccccaggtcacctccacattttacttttttaacataagcaggggagaaaacatatctagatcaatcagctaaaaatcacctctcaaaccatggaggcatggggaaactgaatgacagtgaggatggaaagcaatttaaactctttacaagtaaatctttataattccaggggcagaggtctgatgggtgaaagctttagtctagggaaatgccaaaagctgtggctgctgtggttttatctgtttgtaattttatgtgcagaggggaaaagaggaagaccctgagctataattaaatgatggttgtgattggacatgtgtgtgtaatgaagggttgacctgaaaataagtcagtggtcctcaattctattagccttaatgccacctttttaacagcacacgttgcattataaatgtgatggggcattctgcccatttctaagctgaaatgaagttcatagataatataaccaacccacaaacattattcaagaaaaatcaatatagtgcacttactataatatgaagaagaactagaaggcaattaatttgtagtaaaaaatactctttaagctgtaaatgcacaagaatgatataatgaaatacttaaacttgcatctatgcatagagtcactgagatctcaatagccataaaccgtaaagtgtgggtgttggtgattcaaatactactgcacagggtttgtggtgaagtggttttttgaaatggtaaacgactcttgtaatctttcaaactaaacctaatgccatctttccttgaatttttttttttttttttttttttttggtgacagagtttcgcttttgtcgcccaggctggagtgcaatggtgtgatctcggctcactgcaacctccgcctcccaggttcaagcaattctcctgcctcagcctcctgagtagctgggattacaggttcctgccaccatgcctgaataatttttatatttttagtagagacggggtttcaccatgttggccaggctggtctcgaactcctgacctcaggtgatctgcctgcctaggcctcccaaagtgctgggattacaggcatgagacaccgcgcccaaccatctttccttgatttgtatattggttgcctttctgaaaaattcagcacatatattttttaaaagcgaagtgtaatccacatactataaaattcatccttttaaagtatatatttcagtgtttttttagtacagtatattcacagaattgtgaaactatcacactgatttaattttagaacattgtaattaccccctcaaaaatcccatacccatgagcagttactctccattgctcctcccccaactcctggtaaccactaatctactttctttctttatggatttgcctatgttggacatttcacataaattcagtaatattatatgtggccttttgtatctggcttctttcacttatcataacgttgtcaaagttcatccatgttgtatcacatatcagaacttcatttctgttttatggctgaataatatcccattatatggctataccatattttgttcactcattcatagtattcagttgataccatttggattgtttccactttttggatattatgaataatgttgctgtgagcattcgtgtacagatttttgtgtggacattcgttttcaggtctcttggatacatactgggagtggaagtgctgtgtcatatggcatctcaatgtttaacattttcaggaactgctggactgtgttccaagacagcagcaccactttgcattcccaccagcaatggatgatttcagtttctctacatcttcctcaatatgtgttattgttaatctttttaaaattacaaccatcctaaagggtgtgaagttgtatctcattgtggttttacttttatttccctaatgactaaagatcttgagcatctttatcggccatttgtacatacctttgaagaaatatctattcaaatcatttgcccattaaaaatgggttatttctctttttattgttgagtcataagattctttatatattctggattctaaatccttctcagatatatgtgttgcaatataaaccattctgtgcttttccttttcactttcttaaagatttcattcttttcactttcttaaaggtttcatttgaagtgcaaaagttttttggatttgaagtagtctaatttatctatttttccttttattgtttatgcttttgatatcatatctaaaaaacgtattgcctaatccaaaattacaaagacttatgactatattttcttccaagaattttattgttttagctcttatgttttggtctttaatccattctgagttaatttttgaataacaactgaggtaagggtccaccttcattctttatcatgtgtgtatctagtggactcagcaccatttgttgaaaatactgatcttttccctactgaattgtgttggtgtcaagacaattggtgtcttagtgtcaagacaattcaataggaaaaataagagtctagagatacactcttacattaataagtttaataaaacttaaaacaaaattaagagtccagaaatacaccctcacattgttgggcattgagatcagttgcctaacaatgtaaggatgtatttgtggactcttaattttattccattgatctacatatcaatctttatagcacatataaaatttatacatagtactttatgtttatatgcaaaatggtattgtgttctgggatgctgagatcattattaacaggtttttgacctgtgtgattgtctggttgtatatttgaaagcgaattcttcctcatatgtgaccgtgctgcccattgcagtacatctaacattattagcctctgacaactaaatgacactgtgtcccccaactgttttgacagtcaagacatctcaaaaatttctagaacattgcttaggaggcaataccacacccattgagagcttcttttctaaagttatcttctgcatccttttgcctgttttcttctctgccttttctagcccatgtcccacatggttaaaataggaaactgtccaggttattccttgcttgaaagctttcgatgactctttatggtctgtaatatgaagttcaaacttctcaacatgacttatcagcttgatcaccttccaaatccttttcctacattccacctagcctgtgagattattgatctccacatgcactgcccctctaccaggtatacctacagctctttgaaaatcacattcatcctttggaactagctgcatcagctcctgcaaaagccttgctgttcttctattcagctagttgtgccctgccttgagctccccaaagtgccttttggggggagtttcattccggcatttatcattctgaaacacaagagctggattctctttctgccactggctgtaagtgccctgtcttgttcatcttggcatccctggctctacctcaatcccaagcacagtgcctagcatatcattaaggtcagtaaattttggtcgaaagagtgaatcttcagtattgccatatgttcttacaccttaggaaactaactgttctagttcttctgagacattgattagtcttgcagctcataaagatgtattaccatttgtttatatactacatatgcccttatttgagatgataggcaatctgtacgtgtaattttagggagtaagggaaactcccagttcaaaacagtaacattgtcatcatcgtcgtcatcatcatcatcatcattgcaacaatagaaagcctgccaaatagcaagaattctttaatggggcaaagcttttttgtccaaaaggaaagagacagtttaaaactcaaatatcccatgtgagatgttcaaggatgatggaaatgtccggtggaggatgagctgaggctatgaacagttgaagaagtcctaggacctaaaaggagccatagtgcaggggcttctgaaatgagaacaggtgggagaatagatttgtctgaattgcagctgctatgtttaagcgacttgcttgccaatattggaactagagtcaaccataaacacaaatgctcccattgcagctctggtgccccagccaccgttaaaaaaactttttttttttttggcatggtttgacattttaatattatcttttttttctctttccaaaattaatacacattaattggaaaagtcttgagaaacatggctaaatagaaagaagcagtacccattaccatgaattccactgcctacagatggcactatgaatatatcattgtgcatatttccagtagctttgtttctctccgtatttttaagacctccttggtgtgactctgatagtcagttgttaaggaaaactgcaaattccagagctaaaaaagaaaaaaaaatgggcaagagcaagaagaggatgaaaacaataaatgttgagacatttgccagctcttcttttctgtccgggaaccatgctgggcatggctaggagtgattagagtattgatactattacatcttccactgcacagccatgatgtcagtaatgcaattcagaatgaccagaatgaaattaaccatgagtcagatggcagctcctggcttcttaagctaaggagaaatagttcttgtaggaggtttattaattcacattttgtcttccatgcctatgtttcatttatttagtacaaagtctcaggggccatgtggaaattgcactgtaactgatgttcagcatttccttttcccagctgggtggcttctccttcatctccacaaagagccagcactaggcctttgtgacacagtccctttctctctccccacagcattcacctgcttcagccttcatgagccaccagctgccctgaccactgcagtcacagcctgattggcctctgctttcagtcccttcctccctattctctgccccacggcagatgttcctcctaaagcccaactgtggttattatctctttgctcaggagccttcaacaacaccctgatgcaaaaagaatgaagtttatatccttaggttatttgccctcatctatttttccttacttatagtcccttacttgaagatggtgccagtggaaagtaatctgtgaagaggttgccaagcacttttaaaaaaatattgcttgtgggacgggcgcggtggctcacgcctgtaatcccagcactttgggaggccgaggtgggcagatcatcaggtcaggagttcaagaccagcctggccagcatggtgaaaccccatctctactaaaaacacaaaaaattagccgggcatggtggtgcacacctgtaatcccagttactcgggaggctcaggcaggagaattgcttggacctgggaagcggaggttgcagtgagccaagatcacaccactgcacttcagcctgggcaacagagcaagactttgtctcaaaaaaaatatatatatatataatatatatattgcttgtttagctaattatgaaagttatacatgctcattgtggacaatttgggaaatacagggagtgtgaagaagaaaataataatcacccatattccactccctagaattggccactgttaacattttggttgaaaatggtctgaaattatgttcaatctgtatatacaatattgtatcctgctgttttcacttatcattatattaagaacatttgttcagatgattaaaatattcttataaaatatgatttgaatggttgttcaacattccactatatccagtcatgcattacataatgatggggctatgcttgagaaggacttccctaggcaatttcatcactgtgcaagcctcatagagtgtacccacacaaacccagatggtacagcctactacacacctaggctacatggtatcgcctgttgctcctaggctataaacctgtacagcatgtgactatactaatactggaggcaatgggaacagagtggtaaggatttgtgtatctaaatgtagaaaagttacagtaaaaatatagtattataatcttatgggaccacggttgtatatgtagtttgttgactcaaacaccattatatagcacatgactatagtgacataattgatgtaattatccatgttgatattgttagacatttagttttctatcaaatttttctattataaataatactacagtgaacttgtttgcatgtaaatctgacaacatctttgatgtttgcttagaagagattcctagaagatggtgccttacaactcttctgctcattactttaacaattggcatagtttctttatctcccctactaaatgtgcaatctggcacaaagttctgcccatagtgggtgtaccacaaatgttggttgtactaaaatatggtttacctccctgggcttcagtttcttcttttgtaaaatgaaggtgttgaattatatcatctttttgcaatgagatgctatggtttttgtactttcagaccttagctaacatgtatctaagatatgatactcataaatagttgtgatcccagcccatttcttatatggcaaattcattttctgtggggcttataatggcctgtaacctggataaagactggggtctcgctgtccagaggcaatatggcaaagtgggaagtctttggctttagctttggctttaatttcttctgtgcaaacttgggcaagtatcttagcctttctaaatttcagatcttctgtaaataccattaatcatgtctactttgcaggttttgtgggaggactaaatgggatgatatgtgtagggctccttgtaataatagtagggtttttaatggtcacagctattattgtaaggtatatctcagtaaatcacttaggcctcatgtggcctggatgacaacaaaaaagttggatgtgcagggtttttctttgaggagggcactaatactctttttcaacatcagcacagagaacattgagttgctgtaaaagcctgttttctacatgtgtattttattagcagaatctcaacccaggccctatttaggcattcctcagaaaatctagaggaactaggtattgatttttgcctaccatagacagacacagacacactgaaggaagccacttcattggttttttcatgtgaattatttcaagatctacgttattctcactgaaatatggcctaccaggctatctcccactctcatcacaacctttgtaacagaagtaataataaatggatgaatgggagtctcatttaaaaagtggtgcgcatgaggcttttctggtccctcaaagatttcttttctcttgcacccatttctcagtcctaatcagtcagagggcagatcagagttctcagagtctgttctttcccatggcttccaggtgggttatgatgcacagttctcctactgagtgtattgtgtggtagcttcctgccttattgatttatttatttttggataaattggttggtcttcttattgggtataggccatccaggactttctaacaggatgcattatggggatccattcgtaaggccatcctttggaatgtggagcccatttttttttttcagaaacctcacagcaatgggcagttctgctgcccagccgagcctggtctccagaaagcaaggtgggaaatcggagttgtccaattttgttacctagagaggttcaattccattcgtcaaactcttaataaatactgattctgtgtcaggtgctgtgctggagcaggagataaaagggaagaggttcctgccctcagggatctcatagtcagttgcttttagcttgtgaagtgaaaatatctttgaattggaagatgtggactgaccggaaggaagttgtatgacctagtgtataagagtggagacctggcatccaaaccttggttcaaatcgcagctctttcactgaccagctgtgcgatcttgttacttgagctttccacatctcagtttcattttttccttttgtaaaatggggataataatagtatcttccccaaaagtattattgtaaggattaaaggagatggtttttggaacgtgcttagaaaatgcagggtatatagtaagcattagtaaatagtgtttattattattgagaggcaaggaaccctgaattctagttctgtttcccactgaatagtttagtgatcttgagcaagacttatgactccgaattaaaaggcaaggaaagagatagaaaaggagttactatatttaggctgattggtcctgattatcaaaggggaaattgggttacactacacgctggggggcaaaaagtctgtctggtatacagagatttccctaggacatcccagtacttccacgtcttttggttaaagtcaatggaggctgggcgtggtggctcatgcctgtaatcccagcactttaggaggccgaggtgggtggatcacttcaggtcaggagttcaagaccagcctggccaatgtggcgaaattccatctctactaaaaatacaaaaattagccaggtgtggtggtacacacctgtaatcccagctgctcaggaggctgagacaggagaatcgcttgaacccgggaagcagaggttgcagtgagctgagattgcagtgagctgagatcatgccactgcactccagcctgggtgacagagtgagacttcctttcaaaaaataaaacaaacaaacaaataaataaagtcagtggatcaccccaacaacccagttcaggcaggacagctctgaaccttggtattctcagtttagaaaataaaagggtagggtggaaggggttaactacttaaactccctttcaggagtacaattctcaagttcacaatccccattctacttctgacttgctgtgctttgtacaccaaggtatctgggaaaatagccagttttattttcagattaccatggtagatgtgagtagctcagtactaagactgtgcagctgaaattcaaatacaaaacacacctacttcatttaaaaaatgtcaaatgacagagtgaaacaagatgtttttcctacaatgtcattctgaatgaagaattacagagctggatttcaatgactggactcttttgctggctataaatgttaggttatactataaaaatggcttgtttaagcttctgcttacacctaagcagaagaggtggtcattccttcctgttataatagtgcttagtcctggtatcaatagttttccttgtgtgtgggcctgttaaactgaagaatgtgagctgtagattttcatgctggtaactgcctggccaagtgctgtgttgggaggttgatgtcggaatccaactgcatgaaaatctgcttcacaaaacctacagtaccagacagggctttccaaactttttccccacaaaattattacttaatatgttcttgtcaattgccaccagtattaaactgatagacgacaagttaaacagcacacgtgtgttttcagagtcgtgccaacttttagatttttttcaggggacaaaatataaaatgtattttttttctgtttcagagaggggaattgttattaaaactgatttcttaagtgattgtcttctaaatatcagaaaagatatttctttgaatcagaagagctaatcgatttcagaaatataatgctacctgttttccttaaagattttgttactataaaaataataattgactatcattatagagaaaatttattaagtgggagaaagatccataacatcactttaacacacttactattataatagttttaaaatatttttatataagagatgcggcagtcacaatgtgattttttgttcagtttctgtttctctggcaaatttattttcaccctcgaacactcattagtttgcattattcaagaaagagatgttgattaatccatgttctaattaaatgccacagtttttcttttaaaattactaattctgatacctggattaaaaaataacccaatagattcaagtgacataatacagtttatctgtcactctctcttcctttccctcttttttatctttcactttctcctgaatttgggaagttatactgcagttgtcttcagtaagtgggaacccagtctcacacaatgtgtagttagcaactaaataaaaccaaacactctctgtccactgggctttcgcaggtgaggaggactggctaggctttgccacctctctagcctggttgtctttaccaaatgtttttggaaggacacagcattgctgaataaagataatcccgtagctcttttatttttggtaaattttgtcttatcaataactttataagaaatgagtgacttcaagaataatcccaatcaaattcccttttgaatcagaccttacattagctatcgggttggagagaaacagcacaggaggtctattgctcaagtaattctatcattttaaatttaagtttctgaaaacctaccttcaacagaaagaaaaatttcttttcttaagtttagaattctgtcagcagagtggtaagtgtgttagctgtaaatctccttgataccataataaactgaacttaaaagatagggggaggaaagaaagaaagaaaagccagagacctagagaataatattcaaagcatatacgattagaacaaaagattagtataaataatatgtattttaaaattcctacagatgtataagaaaaaaggcaaacaatatggcagaaaatgggcaatggttaggagcaagcaactcacagaaaaggaagtccatatggtcagaaaacacgtgaaaagtcctcatgagtcatcagagagatacaaattaaacccatttgaagctacttcagacttattatttaagtagcaattttaaagtctgataacacctaggcactagcacggatgcacagaaaaaataagcattgcctctctatagatcccctcataatccgtacataatggaccaaggttttggttcatggaaaacaacagtgaacaaaatgtgacccggcatttgcaactcttctcaataacagaagaaaatcctgagcatagttggacagtgtttttcatttctaatgaaaaattatctccaattaatctttgacgtgttttaatttagcctatgaattgcattgcttcggtcacatatataaccactttaaccacgtgtcttatagtaaccactttaaccactttaccatgtacacatggttacccactttaaccacgagtacttatagtaagtaataaccactttaaccatgtgtacttatggtaacacatagcagaaaagacacccccttccccacattagtgccctttccagggtcttgtaactccttcttcccctcaccctgattgggagcaacctgcctccacttcttccttctgactctttcctctcctcattctctggttctaaactggtatgactactacttctgataatgcattttgtggcctgaagtcccttcacagtctaggccccacccagaattgtcagctccctgaggacatggctcatgtttcagtcttcttcaggattaatacagagcctagcaagcttcttgcagcaaatattttttaagtgatccacagactcctcagtctgggcaattgctgtgtgtgcatcttcgtacaaaatatatgtgcagttttccacttaaactgctttggttggtggtgccttaagccttaggtcctactggggtgtcatgaagagagtactggattagaagccacaagtccagggtttagactaatctgttgtggacaaattgtgtgtctttagacatatcattctacgtttgggaacctcagtttctttgtctacaaaatgaggctagaatatctgctctgcttaccccacagggttatgacaaggattaaatgaaaaatgctacatggaaaagtggtaaaaactttaaaaggctatccatgggctattgttgattatgtgttgtttgtagatcaggacatggccgccgagtaaacagacaacacacagagtgggagaaaatcttcacaatctatacacctggcaaaggactaatatccagaatctacaacaaactcaaacaaattagcaagaaaaaaaacaaactatcccttcaaaaagtggactaagggcatgagtagaaaattctcaagaaaagatatacaagtggccaacaaacgtatgaaaaaatgctcaatatcactaatgatcagggaaatgcaaataaaaccacaatgtgataccatctcactcctgcaagaatggccataatcaaaaaataaaaatataatagatgttggcatggatgcggtgaaaaggaaacacttttacactgctggtgggaatgtaagctactacagccaccatggaaaacagtgtggagattccttaaagaactaaaagtagatctaccatttgatccagcaatccactactgggtatctacccagaggaataaaagtcattacaggaaacagatacttgcacacacatatctagagcagcacagttcgccaattgcaaaaatttggaaccagcccaaatacccatcaatcaacaagtggataaagaaactgtggtatctacacacaatggaatactactcagccataaagaagaatgaattcatggcatttgcagcaacctggatgggattggagactattattctaagtgaagtaactctggaatggaaaatgaaacttgtatgttctcactcataagtgagacctaagctttggggatgcaaaggcataaaaatgatttcatggactttggggactcagtggggagggtgggaagggggtgagggataaaagactacaaattgggttcagtgtatactgctcaggtgatgggtgcacgaaaatctcacaaatcaccactaaagaacttacttgtgtactcataccacctgttccccaaaaacctatggaaattaaaaattaaaaaaatataaatcaggatatggtaaaccacagaggcagcaatgagatttcccaatgctctgtcattgtttagctgcagccttgctacaagaaatattattattattattccatttcttttttttgagacagagccttgctctgtcacccaggctggagtacagtggcacgatctcaactcactgtgacctctagaggcctcctgggtttaagcgagtctcatgactcagcctcctgagtagctgggattacaggtgcacactaccactcctgtctaatttttgtattttttagtagagatggggttttgccatgttggccaggctggtctcaaacttctggcctcaagtcaactgaccacctgggcttcccaaagtgctgggattacaggtgtgcactactgttcctggccaagaaatattattttcacctgtaaaactccctttaatggttaatgtgctgaccaaaggaaccctactgatattctagatggtttaggtgaagcttctttttggtcatttaacttgaagaattgcatctcaacctctcttctatcaacacccttccattttaaaaaaagtcaatacaatatttgccaccatgatgcctttctatgcacacatctgctgtctcatatctcaccttcacctccctccctctctcttactggtgtgtaccccgcccatttgcaaagatttatattgctgggcctcctgctgcaaaaaaggtgcactcacatcagttcaacaaacactgtttgtttgtttgttttttttttttttttttgagatggagtcttactctgtcgcccaggctggagtgcaatggtgcgatctcggctcactgcaacctctgcctcctgggttcaagcaattctccagccgcagcctcctgagtagctgggattacaggcacccaccatcatgcccagctaatttttgtattttttttagtagagacagggtttcaccatgttggtcaggctagtctcgaactcctgacctcaggtgatccacccacctcagcctcccaaactgctgggattacaggcgtaagccaccgcgcccggcccaacaaacactggtcttaaagattgtatataaagcaaatttttgcaaacagagtatcccattttcacattaaataatacatgcaccctctttggttttcatctgcatttggttagctttgattcatagtacattagatttagatttatctcttcatcacattcagtctttgatgaactgtgaacacactactgataggaatcctggtgatttcttttattaaataacgaatccttatcagtaaataattccagccttactattatgttctagtgatggattttcatataagagctatgtgtgggtgtgtaacatttatcttttctccccatttcacttttgagtcactacccctttaaacccatgtgtgacaagtatggagcacagatcctctctccagtgtcgtcagagagtgtcatggagtggcggggtaataaacagcagtgaatgctacctaagccagccctgaccagtggggaattgcagtcatagaaattataggtcctcactggagaacagaaactgattctgaatcatttccagagcctccgaaaaggcacttcctgttgttagagatctgttgtgctgaggttagattgtagctgctggtcccttgctcgctgaggaggcatgcaggactagaaagcacactctccagtgctggagctggaagaaacaattggatctgacactgtcatttcatagacaaagaaactgaaacccaaaagatgtgcccagggtcatgctgctagttagaggcaatagtcccaggacacaggggtctccctccagtttactgattttggttttatttcatgaagtttatgttttagcagtttatccttttgcagaggcaaggtagctttctacaaagcctctagtctctgaagccagacaagtctgtgttacagtccttgccctacctgttacaagtgtatattctttctaagcactggtttcttcatctaaaaaatgaggataatgtccaccttataggactgttgccctaatttgtgttaatgtatatgaaatgcctggtgcatacatattaaaacgcagtgttgtcagtactctaggtgatgggggtggaccaactgctacctctaattttaatgtaacttgcactttctatagcacttgtttggcaactaagtctttcctgtctttcctgctttgggctttatgtagattcaggccctgtaggcctattttgagaagtgagtgggtttttgttttgttttgttttgttttaggacttctagaaattcaataatctggttcttgctacagaagcctcgattgttagaaggaaatctctagtctctttaggctctgaagaccaggatagattctgtgttctgcccttactatttcaaggcaacttcagttgtttcacaagaaagagaaccaagttggcataggaggtgagacatacaagcaggaagtaggaatccctggcctggcaggggtggggtagagtagggtagcatggtagaggagaccctgcctgggctcttcgctagctgagatgagcaatgcaaggaggtgatggctctcaactgcagtagtagctaagaggactagaaaataagtgactagtcagggtctagtcctttccttgggagtggggctgccatggttctgctgatctgctggatttgagcaggctaaagttaaatagaggcagttgcagataaaagactgggggctgcatgtgttcatgtgcatgtgtccatggtggttattttcaagctaagctagaacaagatttgtgcaaattgtctccctctttgatacttttcctaggaaaaaggggtgacaacagcctccttgatgggtctgtagacagcgaggaggagagttgtctacaacatccggaaccctgcagcttggtgaagaaaggagtgcaaaaaaagtcagagggaggctgagcttgacttcctcttcttgctggtgtagggttgagggtcaccagcagaagagtgtgggaaagagctggctggctgggccttggttcctccttgtcctgtggataaacagatgatctcagcttctggtcctattgaatgaccccttccctgctattactagaaaatgaagaaacaagtggaagagggggaaaatactgcatcagaagagtaatggaaaaaaacaagaaatgggaggtagaaaaataaagtggggaaagcatgcccttaggagctttggcattttgtggagtggttcatactggaattggattgaattgaatatgattcatgcaatgcatccttaaattaataatatgctgctgatataaattttccagcctgaaggaaccatggcaatcatctgtggttgcccttctgtcttatagaagaggaatttaaggcccagagaagcaaagggacctgtgtgaggtgaggctaacacagtgagggagggatgtgctgaaaccactgcccagctccacccctctgggtgcttgcttcctcggcattgttttggttccaagcatgcaaagctcatctggtttttctccctctctgtacctctgctcatttctgctaacccttttaccgtaagtggaggagtcctttcagctgagagtaaaagttgggagactggagtcaggtgtagagccaaggagaggagaggtcatctttctccttagtgttcgaagttggagctaagttcttctcaaacaagatttcagtgatatggatggttaaacattgccaacaaatagcaaaaatgggccctgattctatagcaatgaaatgctctttttcttgcacaattttcagtttaatctcctgacttgactttctatttccagcttctctcctctgtctcttgtttctctcctgccacatccatcccactcactgttgtcagaaccttccatcactgtccctgtcacaaccacttttggtggctcccactgcctgtggcttaaggtctaatctccttagttcagccgtcaaggcccggaagagatgagtttcactcatcctacagccattgagcttgtaataaaatacttctttaagaaaactgcaagcagctgagcacccaaaaaattctggtgaggatcaccttatagttcagttaaaaaaaaaaaagagaaaaagaaaagaaaaacaaaacaaaacgaaacaaaccccaaagcaagacttttgctttaacatttaaagcgaagttgaaatagaccaccctgagagatatgatgcagtcattctacaagttacaccttaaacattcatttacaactgatattgtcctacttttattttttatttttttattttattttattattattatactttaagttttagggtacatgtgcacaatgtgcaggttagttacatatgtatacatgtgccatgctggtgtgctgcacccattaactcatcatttagcattaggtatatctcctaaagctatccctcccccctccccccaccccacaacagtccccagaatgtgatgttccccttcctgtgtccatgtgttctcactgttcaattcccacctatgagtgagaatatgcggtgttttgttttttgtccttgcgatagtttactgagaatgatgatttccaattttatccatgtccctacaaaggacatgaactcatcattttttatggctgcatagtattccatggtgtatatgtgccacattttcttaatccagtctatcattgttggacatttgggttggttccaagtctttgctattgtgaatagtgccgcagtaaacatacgtgtgcatgtgtctttgtagcagcatgatttataggcctttgggtatatacccagtaatgggatggctgggtcaaatggtatttctagttctagatccctgaggaatcgccacactgacttccacaatggttgaactagtttacagtcccaccaacagtgtaaaagtgttcctatttctccacatcctctccagcacctgttgtttcctgactttttaatgattgccattctaagtggtgtgagatggtatctcattgtggttttgatttgcatttctctgatagccagtgatggtgagcgttttttcatgtgttttttggctgcataaatgtcttcttttgagaagtgtctgttcatgtcctttgcccactttttgatggggttgttttttttttcttgtaaatttgtttgagttcattgtagattctggatattagccctttgtcagatgagtaggttgtgaaaattttctcccattttgtaggttgcctgttcattctgatggtagtttcttttgctgtgcagaagctctttagtttaattagatcccacttgtcaattttggcttttgttgccattgcttttggtgttttagacatgaagtccttgcccatgcctatgtcctgaatggtaatgcctaggttttcttttagggtttttatggttttaggtctaacatttaagtctttaatccatcttgaattaatttttgtataaggtgtaaggaagggatccagtttcagctttctacatatggctagccagttttcccagtaccatttattaaatagggaatcctttccccattgcttgtttttctcaggtttgtcaaagatcagatagttgtagatatgcggtgttatttctgagggctctgttgtgttccattgatctatatctctgttttggtaaaaagtaccatgctgttttggttactgtagccttgtagtatagtttgaagtcaggtagcatgatgcctccagctttgttcttttggcttaggattgacttggcgatgtgggctcttttttggttccatatgaactttaaagtagttttttccagttctgtgaagaaagtcattggtagcttgatggggatggcattgaatctataaattaccttgggcagtatggccattttcacgatattaattctttctacccatgagcatggaatgttcttccatttgtttgtatcctcttttatttcattgagcagtggtttgtagttctccttgaagagttccttcacgtcccttgtaagttggattcctaggtattttgttctctttgaaacaattgtgaatgggagttcactcatgatttggctctctgtttgtctgttattggtgtataagaatgcttgtgatttttgtacattgattttgtatcctgagactctgctgaagttgcttatcagcttaaggagattttgggctgagacagtgggattttctagatatacaatcatgtcatctgcaaacagggacaatttgacttcctcgtttcctaattgaataccctttatttccttcccctgcctaattgccctggccagaacttccaacactatgttgaataggagtggtgagagagggcatccctgtcttgtgccagttttcaaagggaatgcttccagtttttgcccattcagtatgatattggctgtaggtttgtcatagatagctcttattattttgagatacatcccatcaatacctaatttattgagagtttttagcatgaagggttgttgaattttgtcaaaggccttttctgcatctattgagataatcatgtggtttttgtctttggttctgtttatatgctggattacatttattgatttgcgtatgttgaaccagccttgcatcccagggatgaagcccacatgatcatggtggataagctttttgatgtgctgctggattcggtttgccagtattttattgaggattttggcatcagcgttcatcaaggatattggtctaaaattctcttttttggttgtgtctctgccaggctttggtatcaggatgatgctggcctcataaaatgagttagggaggattccctctttttctattgattggaatggtttcagaaggaatggtaccagttcctccttgtacctctgtagaattcggctgtgaatccatctggtcctggtctctttttggttggtaagctattgattattgccacaatttcagctcctgttattggtctattcagagattcaacttcttcctggtttagtcttgggagggtgtatgtgtccaggaatttatccattttttctagattttctagtttatttgtgtagaggtgtttgtagtattctctgatggtagtttgtatttctgtggggtcggtggtgatatcccctttatcactttttattgcatctatttgattcttctctcctttcttctttattagtcttgctagcggtctatcaattttgttgatcctttcaaaataccagctcctggattcattaattttttgaagggttttttagttttaaacttagaagttggcccctgcatacaagctgagattaagctggtaaatttattctattttctaatgactgatctcctcttgattttttggtttgtttttggtcttatgctaggaaaggcttgatgttccttgcctaaagaggagaaaatcaccttaaaagtccaaatagtaggccagacacagtggttcatgccagcactttgggaggccaaggcagatgactgcttgagcctaggagtttgagatcagcctgggcaacatggcaaaaccctgtctctacaaaaaaaatacaaaaattagccaggtgtggtggcgcatgcctgtagttccagctagtccggaggctgaggtgggaggatcagttgagccctgctaggtcaaggttgcagtaagccataattgcaccgccgtactctagcctcggcaacagagtgagaccctgtctcaaaaaataaaataaaataaaataaaataaaataaaataaaaagagggtccaaatagttttctgtatataaactaggcttctaggcttggtgcggttgggatccattagttaatggcttaatgatgatatctcttgtaagtgatttctgaaaattggaaacaaatggaatgattcaaaactgagaaagagacaactatttatttacatgtacttctcactccgaagcccggacactggtaaagtatttcattgtggggaatgagatgcattttcactttgtactgctcagcagatgcccctatgccttctatcctaactttcccaaggataaaaagtatctaaaaattaatgtcatttcttttctctttttcccatactttttttccaaaccaccccccacccaccccaatagctttaggagtacaagtggttttggttacatggataaattgtgtagtggtgaggtctgggcttttagtgcacccatcacccaaatagtgtgcattgtacccaacaggtgatttttttgttcctcaccccttcttttattgttgacttaattttctttttcattctctcactcaacatttccttaatatactccagtccatcatccagattaaactttagaactctcttaaactaaacaaaatggcctttcaaattacttgccttcctttcaaaacccccattctgctttacttaataaatatcccttctgccatcagttctcccattacagcttattagtcttcctgtactatgctcttgctttggggtaatcaaacaatctgagccttcactgaaagaaatgagttcctggcacatgtagatacatcttgaacttctagaatattaatttaagtctagagatgtagtgtgtattgctgacagtttagggcaaatctgtctttcacaaaccactcacaggagccttgaggatctaggcctttgtttttgtaagcagtaagttatattatgttggtcattagggcctgtaattttgtttccttgacagttacgtgagactaattcaagtcacttcactgatgaagaaaactaaaaccaaaacaataaatcttgaacataatcttccacatacctgaggcaattgggacttcatattgtttttattttagcaacaatattgtttagcaacattactcaagaaaatggttcctatctttattaatgcttcctagtctgtttttctcccattatagcttcagtttttagtatgtttgttgaatgaattaatgaataactaaatgaataaaaagctattatttctttcttagatgtagtgacagtcctagaaaaagtaagacttggccaggcacgttggctcatgcctgtaatcccagcactttgggaggccaaggcaggcagatcacaaggtcatgggcttgagaccagcctggccaatatggtgaaaccccatctctactaaaaatacaaaaaaactagctgggcatggtggtgcacgcctgtagtcccaactactcaggaggctgaggcaggagaatcacttgagcccaggaaatggaggttgcagagagccaagactgtgccactgcacttcagcctgggcaatagagggagactctgtctcaaaaaaaaaaaaaaaaaaaaagaaagaaagaaagaaaaagtaagacttgtccaaagtcccataccaaatctgtgaactcctgggcctaattctctgctaaggcaatgaagatagacctgcaaagtcattcttattatccatgcacttgtataagatccattaggattgatcagcttctgagagaatttttaaattgcagatggactgtatagatggtgaggatcatggtgtcagatggcatggtctttgaatcttgactctaaccttcactggctgtgagaacttgggccagtcattcaaattttataatcctcatctgtaaaatgaggatattaatatctactttatatgattaaatgagtaaatgtgattgctactattattataagtattatgatatagctgtcaaattattcttgactttaagaagagcactcaataagttgctatattggaatcatatgtgtaaagagatgatagtactcaaatgacaagttttctctagattcttaatgtgctgtaatgggatcagagtgtttatttataactgtaggttgaaatagacttgggggcagaaaggaagaacagaggctattcactaagagtattgaaacagggaattcttgtttttgttttgatagttaaattctctactggcatatttctgttgtctatattaggaatttatttctggcacgacagtctctactcattcagatattttcttcctctgcattgtgatgctggaatagaaagtgtgtcaaaagtctttgtgactaggacagactctaaaatgaatcccaaactgtctgtgtagtttgttcctactcagaatcaggataaccagtcagctcaaggggaaaataaaaatattcaaaatggttgtttggcctcttttagaggtagcaatgttgcgtgatttttaaaaaaaacctcttgggagtctattccttcagcattttgtagatgagtcatagtcgccacatgactgttttctgtagtgagagtgactaacagattcagtttcaaatgtcagggtccacacatggagattactgacaaggataaaccagactcaggtgcactcagagcaaggccagatcatagtgccctctgaaatgacacaaacagaattagcacaaaatacaagagatgtgtcccttacagaaataacccaaccacttggatggtttatttattattgatggttaatcagtggcatctaccagaactctccaaaggagaccaacaaaagattgtcactaatatgagattcaagtgccatgccacctgagaccatgattctcaccatctgtacagttcatccacaattaaacaactttctcagaagcagactaatcgtaatggatcttatacaagtacgtgaataatgataatgattttgctgatctatcttcattgccttagcagagaattaggcccaggagttcaaagatttggtaaggggctttggacaagatgtcactgacacaagtaagataggctatgagttgagtattataacatgcctagaataataccctaaggaagatgggggctgcataaagactagataaagtctccatcttttcccaaaataatttgccagtttcttcaccactagcgaaacagagagaacaagaccctgtttttgaaggacacaactattctggtaacctgaaaagtgttcttgggtggagtttggaagagttctcttgtctctgttgcagcctgaatggcacatttcacaagactgtctgtcccactccattaatcctgacactgtgcccacaggttatctttgaccactcatttggttttctcatggtcctgctattaggaaggaaatagcctgggccacacttagaagcatcttctattgtatgtggctatattggcatctagctaacaaatcagtctcttgggacctggggagcatggctagattcttcagagctggatcactcttgataaaactgataaaattaagcttctgtacctaattagcctgatcagcctgtgagacaattgtgaccctacaaagccctacctgagaagctagttctggggtttctttcctctcttacttgcttctcttttcaatataatctttactgaaataccatctggttttgtcttaaaacgattcctgagaagttatgtataaatggaaaattttagttcaattgatttaaaaaagtcttttatcaatgtgatctttgtctacagtaatgaaatgcatcatggtgatcaatccaggcaaaataccctgcccctgaagcagaagtggtttggcagttgtcttttttcactttcttggccactcccaatcttgcttaaatccatctaattgcccaattgcctggtctctgggattatgaatctaatatcctgccacttacagtaaactctgggtgagctttgccttattctcaaatgatgggagccatggactctgccctttttcttcctgagcacactgtttcctatggtgatcactacctgagtggtggcattgatcataaatatcctagaccagaaagtatgtcaaactcttccctaaccagcttcttaatgtgatagatgggccaatacagcatgaaggataacaagttgtgggaattctagaaaaggtcctggaatgaacctcagagcacatgcaatcagtcatttctatccatcctgtggggttgtgcaaggagtgagggagcctgagagtgggaaatgccatgttatttatccttgggaaatagcagtatagtgtgaagggcaaagccctggactgggagtcagggaatctagtcaccgtactgcttttaactgagcaaacctgggcaagtggcttcacctctctgggtctcagtttctattctcatcaactgaatggattagcttaggtgatttctattaaatgcttattgaatgaagggtggaggaaaagtggttagagagaaagggaagtaagaagtaactgattttagaaacctaaatatacagagactagattaatttggctataaggtgaaatttaagaccataagcctggataaattattaggagcatgtagatgagggaaaaattcaaccctgttacaaagagggctgaaactctggagtctgaaatcctatctcttatgtgctctgtgtgcaggcagcttcatctttctgaagcctccctcatctagaaaatagagagactgtgataatttatatgcaagcatgaacagcatattatttacagaaccaccagagattaagatgccttctgttcaggctgtgactccataatctctggcagtttgaaatgaggaggcaggggaggatgtgtgtggcaggcaaaggatgtcatgctcatgtgttagtgtactgtctgtctgtgtttctgaagagaatgctgtatgtagaaggagctcagaatgtagaagcagggtcttatctatcacctgcttgtaattaaggaacaatggtatagcttcatagtgaacaatggaaaacttgagcttcatgaatatttagtagtcactttgtgtgttacattgggttatgctcaattgatggctaaaattcccaaaggcagcacagagcaggacaaaatgctatgaactgagaggagggactaggttctagctcttatactgccacaaatttactagctgactttgggcaagtcactcaatatctctgggttttaactacttcaactgtaatacatagggaaaagagcatggtagggtgatttctgagatttcttctagttacaagattggactccatgagccctgaattcaaatgatattcctaagatactcataaaatccctgttcaaaggataagcccctggctgaataaatacatccacctatctgtattcaagtttcttcagtccttccagtatgacctcccaccagccagataaggtcagcctgcacttgtatcatttctgttcacaccttcagcatttgcttatgctggtcccatttctacaatagctttctctctcatttatccacctgaaaaaatattatataccattcaagatactgttcaattataatttcctctgtggaagtgaattgtttcctggtctctccttggaggctccctcataatatgttatagcatgtgtcatgttgcatacataattagtggggattacatctgtggaactttcagattactggtgacttgaggcagggattatgtctcatatccagtgcctagctaggcccatgcttgtcataaaacaagtgaatattacaatgtttcttcaataaattgcaaagatagtcattttagaatcatgatttactgattttgcatccctaaatgccaacctttaggccagctctcacattataggcatattaacctgctgggaatctttgcccctgcagaggttggaggaggctttttgtaggagcttctgggggctaattttaaaaccactgatctctgaccccattgttttacttattggtaaacttactggaagtctggtcatacttctgaacaataactactacagacctcacatgagcatggctggatttcacctgtgggtggagatgaaaagtaaacgctctctgtctgcatcaattggagaattagggaccaggaacagcacattacttagagcggtatttttcagtgggggtggagtgctattggcattttggacaggacattttttattctgcaggatttttctgtctaatgcaggatatttaacattctagatcccagtccaccaaaagtcagtagtaactcccctctcctccagtatctgtgacaatataaaataccccttattgaggtgacattgcctcaggttgaggaccattaatttggaagaaaccaggaggcctctcctattgtaagtgccattttctagatttacaaatttaaatccaagctcttcttaaccttgaagacattgatttagctgtcaaccctggttcagaattgggtatcaacagcttgagagtaatttctggctgggaaagactgaaaggatggaaaacccatctctttcctctggactaactctatggttaacaaggagctttaattaatgccatctcactggccctatttgtaatgtgaggggcaagatctattacccctattttaaaggtaaggaagttcagtcttgaagtagtgaatggtgctggcccaagtgtcacaggtagtacatttcaaagctgagtctggaaagcagatcttctgactcctaggccatcccgctccccacagagtatctagaaaaccacagaggaggccgggcgcggtggctcacgcctgtaatcccagcactttgggaggccgaggcgggtggatcatgaggtcaggagatcgagaccatcctggctaacaaggtgaaaccccgtctctactaaaaatacaaaaacttagccgggcgcggtggcgggcgcctgtagtcccagctactcgggaggctgaggcaggagaatggcgtgaacccgggaagcagagcttgcagtgagccgagattgcgccactgcagtccgcagtccggcctgggcgacagagcgagactccgtctcaaaaaaaaaaaaaaaaaaaaaaaagaaaaccacagaggaagaagtagagttatgtattccgtaattggccttggtgttgatgggatatgtagctagtttaacaagccagaaactagagctaaagaataaacatgtatatttgactactgtcagagcattctcagctggttagatataccatattaagagctaaatgcccatttgtatattcagtacattgaaatacacagtgaaacagatgggtactgtggtgtattgtatttatgactaatttgttaacataggattaatgagaagaaaacgattttcacaacatgattttgaaagttttagtcttagccttgacccaagcctacctccaggaaatgacactctgggagctctccctctctactgtaaaagctgtctagattgttacactgagtcaaaaacctaaaggcagaagctagaagactctactgaacagtaaagatgtggtgggctgacctttatagcattagaaggtgctggattgatcctgcaccagcatccatctatttctggtggtgtggctggccacacattctgggaagaggcagaagagtggtcctcaccacatgcagccacctgcacagcaccaacattcaatgctgaatcacgtaaacaattggtcaatgacatcaattgcaaaagcacaagagccatcttacagaaagacaatgtagattcccacacacaggactgaagttctattcaccatcttggttgctcttctagtaaaaaattgagctaaaatagaaattctccagagaattggctggtgtgtcaagtggctataaatggcacacatcagctatctatctgtcagatttgtggtttttatagaggcggtgtagcatggtagcacaaacttgttacctgtgtcaaattgggcaggtaatttaactactttagtatccaggtttctcatctgtaaaatggcgatgatagcattaccaaccttataaagtcatagtaattgtatataagtattagctatcattatcattattgtttccaggtaaggtactagcatgaaattcagaacttctgataaataatgatgtaaaaataagaatcttgatttatgtttaattcttcggtcttaaggaggcaaataatggattattcaagctcttggccctatttcatcgaaccatagaatgttatggcttgcaggatattgtacactatttaatctaaataacttcttttagggatgaagattaaaaagtaagaagagttaaatccttgcctaagttcttgcaacatggatgatgctgaggttttgaatctttttctatggcttatagttccacccctgaaatttctacctgctgaccatccttgaccagtagttctttcacctggaggtacaaagggaaataatctgaaatccaaacacatactctttcctactccctgaatctttgagaaaagataaacctgaatctttgataaactcatagactaaacaagttttcatgactaatgaaatgatgcatgatgttaaaaaatgcagagtgggttctataattgcctgagagagagaagactcaagtcatattcctctgacatcaactcaggtgagtgttcccagcatcaatttctctctaaagtgagagagttcagttatgtgattgttataaaatattgacataataatatgttgtataatctctaacaaacaattaagcctttccatttctgaagaccattttgtcaacagaatgtttaaacacctgggtgcaattgtttcttatttactgattatttttcaaaaacatggaaaaatttttttaaaatgaagagaaaatgagaaccagcttgatcatttgttgttcattgggttggaatattttgcctttggcaaataagaatcagttaattctaggcgtttccttattgacttgctagaatagaatgagctgtttttctttcatttttgtcagtaatcaccagttaaaaccgttaaagggaagccttattattcctggaaaaggataatattctgtaaaccatcagactgcaatgtcgctagttctcctctaattaatatatgtgctttcattctaagctaagcttcttctgaatttaggaacaatagcaattgcctgctgctatcatgaaggccagccaaatactttctgaaggaaatgacaggtatctcttcaagataagagtggaaaagaacacacaactccatttaagctttgagtttctgaagttgcctcatcacagtgaaatgcaaggcccttgggctgatttgtgctttgttttctgggtgaagcagcaagacacggttctcaggagtagtctatcttggccatcactatttatgccccgagaagggctagaagtgtggttattagggtaagatttgatatactgtgtttgcctcctgttttatttgctaaaggaaaatgccatagggaatactgaattcttggtagagatagacgagtgtatggcatgaattaacctggaacaatggtctgaattcaccaaatatttattgatcatccatgtgttccaaacatccttaaccacaacatttttgtgtcaaaataggacattcttcaactatgttattgattaaatggatgattgtatgctattaggatttgtttcaaagctacattgtcagttctctttatctcttgggatctacaattagagaaatcctttaagctacagacagagaagaactcttttcagctccaaggtaatggcattttcccctttccaaaatccaggtctttccaagaggtaaacaagtccaatgaagtgaataaatcatgacgcccaacaacatatgtttattgttaaagctagcatcatctactagaggccagagttaacagcttcgcttatttttccttcagtaatatagtcccatatgcaacaaaggcttgaggacagcaggcttgaccagaaacagtggctaagtgtatatctcaactatttacctggcagagcatcttacaaggtagcatctatacctttgttaactctaaacaaaggtaaactagatctctggaactggagataaaacctcatgcccttggtcatactcagcttgattctcaggtgctttgttaatgaatgaatgaataaataaagtgacttcgttgagttttcaagatgataaaacctaataaatacagtgaagaaacatctgatggaatagctttgtttccaggcttattttctacaatatctgagcactgtgttaatctttgtgttataagagaaaaatatttaagtatcaaaatcgtgagccactatagaaggtatggctgcatctgaaaagcagttttacttgacgcataaatagcatacacagatcaaagtgcgggagtaggtcatagatgccaggtttgggagtaaatgttagccagatgcataaggttctcctaatgaccccaacagatttcaacttagagaatgaataaagacttgttatttaaggttagaatccctaatgcaaactcaataattcagtcaagttaatgaccttcacttttgttttggtttaatcaatgcatgaaatagaattattcttgttctgattgatctatgagaatggatagaagctcatttcaatttgtaattagtaaaaatatgttttgaaaattatccctctcaccccctcacactgaggaatatccataatgcttgtattttgttatttctgaacccctattaccatgatgggttcattattgatgattacttaaaaactattagttaaaaggtaaaagctgttccaaacaacttagatttcctagttattattttttttaatcctgagaagaaaatgttcaggaccaaataaactaaacaacaaacaatgcacggtatttcaattaatagaatctaaccaatcagaaatttcaataactaaattttttcttcaccgttccacttttcagtgaaataaatgaccacaaaggcaaaaatacagtcatatcagattaaaatcattcagaaatgcattcagcctgaactaccctatttgtacattgtaccatatctatataaaataataaaccattgcagattcaatcatgctccttacaaagtactttcgtatacctacactttgagttttacaatagtcctttgagatagttatggcaattctcatcaacatcttagagatggagaaatggagctctagagggcctcataatgtcaccaagtagtatgtgacacctgtactactgactccaagtcttatattctttccatgtctatcatactatgattactaagacaagataaacacacacacatgttattacatatacatgtaatctataaacttggattttgaattggaactttcagattgtatctaagtcaaaattcatgaaaccagcaaacctcattcatggaatattttactttatagtaacatagaattcatatgaagcaaactccagaggctaccagctccttaagtaagacatgcacactccttcatagcctaattgtcctaggtatctttgggctactggtgatgtattaggcataagtggctttttctttctttcttggcagaagattcaaagaagagtaggtccttacttcttcccagttcctagttcttggttgctgtgagggtgtgtttagtactgtctaaagcagcatttttcaacacaactttcttaaatgataaaaattttctgatatctgccctgtccaacacagttgtcattagccatatagagttattgagcacttgaaatatgactagtgtgactggggggctaaatttttaattttaaaaagtttaattaaaatttaattataaatagttacatgtggctagcaactaccatgttggacagagcagttctagacagtttaaggttctggttcacagggcccagagcacctcagcaatagcattcttgacagatcacctagtgaaggtacaatagaagttatgtatttaattacaaattataccttaattggctctagagaaggtttgaagcagaatgttgacattatcaataagaagccatatgggaatttttaaataagagataacaaatggggagaatatgtttggtaaatattaagagatgagagagcaaaacagtgtcatttgaactgaatttgaatttctaaatgctatgttttggagcaggatggaactatcaattaaatacaaaaatccaattgatgaagatgagactttactatgagctggaaagagaagaaagaggaaatgaacagaacatcaggttctgctgtatgttagagcgaactagaatcctaggaccatctttagtggagccacctacttgacagaattgtgataattcagtaaaatgattgatgaaataacttcacatagtgcctcacatatgataagcatttcatagatattagcacttataatgatctttatttataaaaatccttaggtcttattagggccttttcccagtccctatgagaacatgggcagttgcttagggtaaccaattttgggaaaattattttttggggaataggtcatagaagaggagatatagacaagatagggcaagtaaagaaatgacacactaccattcccatttgtgaattgctgcttcagagaaaactgttactgaggaaggtgggtcatatctcccaggtatgttgggttagacaacactggaatagtaggaccagaggggaaagagctggaagacaaaggagttggaagaaaggtaagaggaatgcttgtatgttaagtgtttgtatttttggcatgttgtttaatttagttcactgatgctgacgtttagtcaaagataatcaaagaaagcagtatggaagagtatttcagacaccatgaaatagtgggaaaggccctgggcctggaatcaagttaactgggttctaatttttcaatcatgtgacttagactaatgaccatcttttggtttccaagttttctttcttgtaaaacgatggtgctaaatgatattcaaagctattctagttctaaaattcaacagtataattctaaatatgaaagtacatgtggactctagttctccagacttcctgaagccctgctactcttttagaaaaggctgctggtttagttctctaacttgtttccataatattggagctgaagttgtgtgaacagtggtatctcaagcagcatgcaaaagcagttgggagggtgggagtgcatgacagtgagtgggtgaacggattaaagagaaaagggttggaagagaggagagtgtgtgaaagagaagagcaggcctccctcctttgtcattctcctgctataatctccaataacagctattcagagccaaataccaaaatgaaggcatgaaaatggcttggactttgagttaaatagatctgattttgaatccaatctctggaatcaagtttctgtttccttctctgtgtgatacttttggttggcagctattgtgaagtttaaatgaaatattattacccagcagatagaggtgttcagtacaaataggcctccccaaattggctcaatcctttccccatcttgcccataatataaaagactagctaaagaaacaaacatacagggctgcttagcgatctttatctagagcatgtaaataacatgcagtggggaaagaagggttctaagaagaggaaaaagctacaaccatgaagcccctcctttgtgtagcctaacaattctctgattcctgaaagccacagaaatgtttattatcaaaacagcatccctaactgcctttcaacactttaccgacaggaagtctcactgctcaggtataggaagtagaacgaggaagctcccgaagttagcaaaactggatcctgaagtgacacccgcttcctgctcttccactcaggaaagccgggaaccttttcccaagcggagtcctggggaagcagaaaaccgggaaaggcaaagccccttcttctcctgtttctctaggtcgcttgcttagaaccctttagggttctaacgcagtttctgctcgcagggaatgtgggccctggcggtattagcacccagcctctgagaactttcagcaccgcggacagcgccattccctgcactcagtcggaggaggagagctaccttgcccccagcgctctcctagaccctatacctagggggaggcagggtgacatcctgcggcccttgggcaattcgggccagtgacgttcaccgacactcaggcggggatcccttcgccagagccagttcctttgagtgtctccgctcaaaatctcaaggaaacgagcttcacacaggtggggggatgaggagtgccagaacaggagcgagccccgctgctctagccttcctgcatctcttctcgcctttgctttgctcactcttcaatcgcaatataaaatactcatttggggagggggcagggtgacacaggagagagaaggagggtgggggctgcatcccgcgtggccacgcagccctaacctggccctcttggattagaggggagctgatgtgctttggaatgggagaagagaggagactgagggttgaagcagtgcaggagagctccccttgctggggctgccggctctgggcagggagcttccctggacaccgctcccgtcacgtcctcttcgccgctcccgggagagtcaccactctccggggacagacgcccctcggggcgccaccatcctggtcggggtgctgggctcggcgggagtccctttgaggagtttgctcccaggtaaaagggcagacgttgctcccgacctccccggagtctgcggccggaaaagcgtctccgtttcatggtctcggtccgaggcggagaacggagctgcccgtgcggggtgcgcgccaaggcgggggacaggacgggcccggcgtctgccgagacctaggctgcccgcattccgctcgcggctccccttctgcctcccgctctagcggcgccggagccgcgctggcccccgccccgcccggcagctcccgcgagtcagagcccggtgcccccagaccgcgggcagtcggggcctcattccgggccagagcaggaaagagcccgacccacctcctcggttcttccagggaaccccttctcggagggcgccctgggcctccgcgccatattcctggtcccccgctcccggtgactccggctccctgggtcattccgggagaggcggccatcccagttgcaggggtcccgctggggcgcggggggcgcggagggggacaaacggcagcgaagggggccgttcacttaccggggtcggggctggaggcgacgagctggctgccaaggctggtggctggcagtccgcacttactgcgcggagctgtctctctagctgggatgggaagtggtggtggcggcaaaggaaggcaggaggcagccgctgctgctgaacagctcctcaattattcagattgggcccccaccccccgaacccctccccgtgcctgctcgtcctccctccagctcgcctgtctccgcctccttggagtcacatggcctgcccaaccccttacatactgggcccaagcctggcaccagaccacctcccacctggcccccctgccttcccctctgtctgccgctcacaactcctcgctggccttctgagcctccagttgtgacctccagtgtcttatgtcaggctgcagggaggttgagggggccgtggatgggggcagttctttgccctgggaaagcagggaccagcaggactctgcaatgtctgtgcgttgggaaggcatctgccgcagctctgcccctgctagactgggctgtccagacctccttcctgccctctggaagcttccctcatcctctgcggagccttcgttgctcttaaacttccacatccctgagccctacaggaaagaaaaaatgagagaggttgatttctcctctcctcctaaagaagacaagacccacctctgtcttcaaagcttaagtttatcgttgggttcacaacatcttatgggtgcaaagatcatggacttgagatttgaagagccattaggattccaatctgtatgaccttggagcatttaactttctagcttttcttctctcgtctgtgaaataaccaccttgcagtattgtcatgagattgagaaatcatcatgttcttagaattgcctagcctagagttggacaggtatttggagctcaataaaggagagttctttttcccccacctttgttaaaataaatttcacaaggcaagaaggatgtgatgtgtgctaatacagtgaaagcatcttttaaacatggaaggaggcatctgtgaggtcaggctagacaagtaccagtctaaacggagacaagagtgagataaggtttctgttttgtattagctcctttaagatgagtgtcctagagccaggttatgtcccaaaaggattgggactagatgggaccaacccaggcatgcttggccacatcaccgaatgaattatttaacaagcattgagtagactgatttggatgaaagttatctacataaattcttgcactttggcccaagccctcaaaacacatgggaggcaacaaaatgtaactctcctatccttggaaatgaattcactgggcttgtgtttggggagaatactggctgactgatactcctctagggtggagcagttcaaatctagctctactttgtgggtctgccctgggctcttcccagaaagttgcttgatcattgccaggacagtcttggttagtccacctacctcaagcttgttactgccttcgatgagcatctaagcctgacaatatccccatattttaagctttgagtagttctgcaggatatgttagacctcctgggatcaccaagaagctgtgagacattgtaggaaaagtgcaaagttaaaaaatcagaaatttggaatctcagtgcaggttctgccagctacttatcatatgatttttcacaaatcacttaaattgtcagactctcatcttcagaatgggaaaggaatgtctacctgccttctatataagatggttgtgatgtttagatgggatagcacatgagaagtcactgtaaaaggtaaagagtatgaatactatgggctgaagaaaaccctgagtctattctagtccaaatgaattatgagggtgataagatgggaagatgggatttgtcatggaatatgcagctactaaaatgttggtgtgttgctctaagtctgcatgtatgcctgtagctcaggggatgtgattattggagaactgcattctttgtttcacctttttctggataaatttctgatttaaatctccatatttccctggccttttatttctggaacaccagccacaatcacaatagttatgaatatttactatctgagaaaagtttgtgcctatatttcaagacagcagggtttagacttttctgcctttgctaggtaaaattgacttgggttggtaattcaaaatggcttcgatttcaaagaaaaaaaatttggattctaggaacaaactctagacattcatcagcagcttgaatgatgatatgtgtttctagtccactgccaataaactcaatgaaatcctcacacaaaccaggaactcctggaaccctccaaccttaagcagattccaatcctatctcctggtgtacttccccttaatattctttggaaattgctaatctggacctctttgtatttagggagactaaaagaccagaaagtgtcaaccatgcttctatatataccactgaaaaaattgtctgggctaggtaaaatgctgcttctgactcctgcctacctctccactgacatcaagaaacatgagaaagggaaaaataagcatgaaatcatttaatttggccatgatgcctttatgagcagttacctggacaagcataaatttcagaaaattttgaacagtttcaccagaaattgctcaaggactctgaatatatattttttcaaagcagttttaaatgtccaaggcaactttacccagtgaagagcagaaaaggaaacttagagaaccgatcttgcatagattgcagtagaaagttataccttagcaatgatttcttgtaaaggtttcccttgggtcctcccttacttataagctcttgtcttttgcatgatgattgttgactttatcataagccactgcaaacactttccagctgtaagtagagcattaatgaacaaagaaatataaatgcagcagacaaaaatttaattatttagagccatgcacagccgcaacaattggtgaagttccagagttcaacaatgatcttacaaagtgactactaactagatctttaaagtacacatccttgttttcttgttcctacagttgaaatgtggaagtgttgattcatgtattcaacatattctagacacttaggatacagccatgaacaatacagaaatggttctgctctccttgagcttacagtctagagcagggggtcagaccacaaacaagtaaacaaagcagtggagataagtatcatgatggaaatacaacagaacaatataatgaagagtaaaggggcaccacttaagtgatagagaactaacataagcaaatgtggggctcagagacaaaagcgattactctccagggaagcagcagagcactcttatctagggccttttgccaaaatagggtcattaaaagggtaacgactaaaatccctcatgactgacctgcttgaatggatggtggttaagccatgagggaattggccagatgccttaaaaacaattctccatttttgtctcatgattcatgaaaatgagtacctgatgctttcttctagaaggaccccaagctcatcagtgcccctgactcttgcctctgagcagattcaaaacctgagaaaccaaagacactgtgatagcctggctagaggctcgtctggaactttccaaagggagcagtacctttgagcagcaggaagacagaaaataagacacacaaccagaacctagcattaccataggcacaccataaagatctattaaacaaacaacctgctgctaggatcctaccaattggactggaaatttataagcaaattatctatgagtaaattatcctctaggtatttaaatttcaaaaggaagaaggaggatgctgacctaagcatgctcattttattcctaaatttacaatagaatatagcactttccccactcctaccccatgcagagtaaataaagttgcctaatcagtgaaactatggagtcaagacagaggtcaggactgtcaaaccaatggagttccttgacatggaaggaatcgttaaagcaaacagttcttcccatttattatgtgtttccttcctttaattacattcactttcctaaattaatttattttaaagaggttttcatcactaccttaaatagaaaactgatatcagttgccataaatacaaggcaactatttaaacaaacacaatgagaataaaacaatgctattatagtcaagataaatacctttgccttcccaggaaccgaaggcttgctttctccttgttaaaaaggaaattagcagctgttagtgaggtgttaaagacattgacatcaaactgtctttctccataaagtaaccaaaaagattgaatgataagtggaaaagggataaccttcccactaggtgattacaggccatttaatgttgagtcctagtaccatctaaatcaatatttctctaactctaacgtgcatagaaatcatctagggaaccttgttaaaaatgcataattagattcagtaggactggggtgggactcaagagctcgcatttccagcacaatcccagtgacactgatgctcctgattcttggactactctttgagtagcaaggatctttgaatagcaagtgcctttgatgctgtattttccatattttgggagatactagctcttattttaaagatgagaaaagttaggactcagagggtttgactaacctcggttagttttcttgttctaacaagtggaatgtggaagtgttgattatttattcaacatattctagacacttgggatacagccatgaacaatacagaaatagctttgtattagaactatttagttggtaggtgagccagagctaaaacttacatttcacagatctgtctccaagtctgggtgctccttcccaaaagatctgtaaaatatcttgcttactagggccaaaaacccaccccttttcaaggggccacaacatgaaggccaaggcttagactgctatattctataggttattctgtgtaaatacaaaataaaagccaatacttggactgttgtattcaatatgttagtctgtggtaatgtacatgctcaaactttcagtagtttgaaataacaaaagtttatttactgttcacattatgcacccactgtcagtcactgtgggctccgctccatgtagtcactcaatactatcttatgatgtcctgtctcagcctaacgcttcagagttcaccctgggtggcaagaccagggctgaaggaccttgtaccagcaactaaatgctctgtgctgaaagtgatgcacatcaccatggcccacaactcatagtccaggatggctcatatgaccccactgcaatcacaaggtgagtagggaggaataatactttcttctacatgtaatgagagtagaatcagataaagtaaacggtaaaagtctctaccatataggttttttttttccatcactaacagtccttgattctgtcctctcaattactcttctcttaatctttcctaactaagtttcccagaacaatgggccaccatttgtccatttttccccgagttctcatcatacatagggaaaaggcaggcaaatggcagcgggaatgcagaatgtcattttggtgacagcaggggcatcaaaagaggtaggtcagtcagggaaagtggtcggggtgattgcaggggagagggggcagagaaaaagggaaggaaagaaaactatcacttcttgagggcctactaagtgttaggccctgtattaagacatttaaataattttgtactcataatattcttgtcaagttgttatcatcctgctttacacacaaggaaacagaggctcagagggcttatataattttttaaggtcaaaatagagaataaatcaggatcaatgccagactgcaaatttagaatctctcccaggaagtctaagaaagggagccaggcagcactggctctggagaatgggccacttgttcacattgacattggaattcctgagatttggctttgctgtattaggcatgtgcagacaaacagctgaaacatccaaattctatagtggctactacatgagatgccacagtcttccactgaggagagatgtatacatgagttcccatcatgctacaagttgattccactccccattctttttcaccacatgaaaacgtctcttatgtcagtatatctgacataagagcaatggttgcagtaaataatctaaggatatgatcaagcaggcattccaaacgtacaattaaaaatctataataaacattaggaaaaactttgcaatatattaagagacctatctcacagtatagaagggaatagatgcttggaagtttaccctgtctgggctgtaggaggatatgatattcacagctagcatgggtgttggggagtcgttctctggagcctgagagtgatggggtctagaattgtcccatatactgctgagatcatggtgggaaggagcagggagtcaaactgacctaggtttgtatccaaactcaactatgaattaatgatgtgttatttggcaaatcattccagttttctgaggctcagtgtactaacctctgagagggcataataatgcctgactgtagaattgtgaagtttggaaataatatgcataaagtgcctggtggttatcattgttcaatattgatgactattctttgtgttgttaacaataagaagatggatatgaaggggactaaataggctcagccactatctacttgagtgagctcagccatggcagctccccatgctgagtctcatttattcttcacaaaaatgagggaatgggaataggtttcttcaaacaactcttccattgactcaacactacaagccaagagttgtgtggttttcccggggcagggtagggagtagttctggtgagcggccacactgagtgcagcaatgagaagagtgccagctcatgctgaataaaggagaccctgggcccactggcagagttcccgagcctcaggtgttgcaaacttcattttctggccattgccaccagccaatgactcattacaacaagagacaatgaggaaatgaccacaggtcaagaagtagccttttaagccaactttgcatgtatgaaaggtcacattgttgaggaagcattcacagcaacagctttgaatacaaaacaaaaatgtcaacaagcacagacagaattggagggaaagaaatgatgctcactctaatgggattgttagcttgctccagtcttggcagtccatgtgattgccaccaagtgcataatgtattatacttggtagtgggccaattatgtccgcagcaaattccctttaggagatggataagcaaatcgctacgctctgagtaagcatccatcgtgtaaaacagtgattattttattgtcagccttctaaagatatgtattcacctgctgtgtataagctttctcctatttaattcaatgacttttagaaaatgagagtattttatttttttactcatttcttaaagctcttaagaagaccaaagactctgcaaagtgttccagtacattagatgaaaatgatgagacaatttagaaacaggaattaagttccagtctttatctcctccaggtcccagctggggaagacctaaatcatcaaccaggatgtctccttccagaatcctcagggaaggagagttcacagcttggctgccctactccccctccttccacaaaatgttgtagtgtttaatcatccttgcattaaggtttcctaagtcttattgtttcaggtaccaagagtgcctttaagatgactgagggcgaaaaccagtgtgttctgatatgaggattcagtcattccacctgagtagctgctccctgcagccacctgtcttcagattggccaatcattctggactctggcccctagctctgtggtcagcttggtccaggtcatcttccccatgtggcttggaggaatttctagcaaactcctggattttgaaacatgacttggcctctttgaccaagtcctgaaccagacaccagctcactgccttccaggtctgatcctgtagattcctcatttaatcatccagccaagccctgtgttattgtagaggaggcacactaaattatttcttatttcaatctgtgtttatatattggtattcaatcgaggctttatctattaaaattgtgatcaaataggaggcacttatttcatggattatgccattataagaaataaggatggcttcacttacacttactgtcccataatcatcattgcaatggtttgcttcatccacgaggtctgtttccagtgttgtgcttctctgcatgttctttgggatctccatcttctgatttgaagatatggtgaggatgatgatgatgacagtgcaataaaaatgtctgtggcttccttctcactccccattccctaatccccataccctggctttattggctgctgctgtgttcactatgtttaatgttgggaacatttgtatcaattaaggtatcatcggaagtactttaaactataatgggaaatgaggcaaacttaatcctatctcacaatagcttaaaggctgtcattgttttgtccagaacagatgctgacaatggctggtttaacaagcaaatacccatctcctttgaattc

SEQ ID NO: 54 - DNA, 1804 bp, Homo sapiens
  Genbank Accession No. AF073515
ggggccgggcggggccagcggcgcattagcgccttgtcaattcggctgctcagacttgctccggcctccgcgtccgcgcccagcgcgcccagcgacgtgcgggcggcctggcccgcgccctcccgcgcccggcctgcgtcccgcgccctgcgccaccgccgccgagccgcagcccgccgcgcgcccccggcagcgccggccccatgcccgccggccgccggggccccgccgcccaatccgcgcggcggccgccgccgttgctgcccctgctgctgctgctctgcgtcctcggggcgccgcgagccggatcaggagcccacacagctgtgatcagtccccaggatcccacgcttctcatcggctcctccctgctggccacctgctcagtgcacggagacccaccaggagccaccgccgagggcctctactggaccctcaacgggcgccgcctgccccctgagctctcccgtgtactcaacgcctccaccttggctctggccctggccaacctcaatgggtccaggcagcggtcgggggacaacctcgtgtgccacgcccgtgacggcagcatcctggctggctcctgcctctatgttggcctgcccccagagaaacccgtcaacatcagctgctggtccaagaacatgaaggacttgacctgccgctggacgccaggggcccacggggagaccttcctccacaccaactactccctcaagtacaagcttaggtggtatggccaggacaacacatgtgaggagtaccacacagtggggccccactcctgccacatccccaaggacctggctctctttacgccctatgagatctgggtggaggccaccaaccgcctgggctctgcccgctccgatgtactcacgctggatatcctggatgtggtgaccacggaccccccgcccgacgtgcacgtgagccgcgtcgggggcctggaggaccagctgagcgtgcgctgggtgtcgccacccgccctcaaggatttcctctttcaagccaaataccagatccgctaccgagtggaggacagtgtggactggaaggtggtggacgatgtgagcaaccagacctcctgccgcctggccggcctgaaacccggcaccgtgtacttcgtgcaagtgcgctgcaacccctttggcatctatggctccaagaaagccgggatctggagtgagtggagccaccccacagccgcctccactccccgcagtgagcgcccgggcccgggcggcggggcgtgcgaaccgcggggcggagagccgagctcggggccggtgcggcgcgagctcaagcagttcctgggctggctcaagaagcacgcgtactgctccaacctcagcttccgcctctacgaccagtggcgagcctggatgcagaagtcgcacaagacccgcaaccaggacgaggggatcctgccctcgggcagacggggcacggcgagaggtcctgccagataagctgtaggggctcaggccaccctccctgccacgtggagacgcagaggccgaacccaaactggggccacctctgtaccctcacttcagggcacctgagccaccctcagcaggagctggggtggcccctgagctccaacggccataacagctctgactcccacgtgaggccacctttgggtgcaccccagtgggtgtgtgtgtgtgtgtgagggttggttgagttgcctagaacccctgccagggctgggggtgagaaggggagtcattactccccattacctagggcccctccaaaagagtccttttaaataaatgagctatttaggtgcaaa

SEQ ID NO: 55 - DNA, 1650 bp, Homo sapiens
  Genbank Accession No. AF178684
cgccacgcgccgagccgcagcccgccgcgcgcccccggcagcgccggccccatgcccgccggccgccggggccccgccgcccaatccgcgcggcggccgccgccgttgctgcccctgctgctgctgctctgcgtcctcggggcgccgcgagccggatcaggagcccacacagctgtgatcagtccccaggatcccacgcttctcatcggctcctccctgctggccacctgctcagtgcacggagacccaccaggagccaccgccgagggcctctactggaccctcaatgggcgccgcctgccccctgagctctcccgtgtactcaacgcctccaccttggctctggccctggccaacctcaatgggtccaggcagcggtcgggggacaacctcgtgtgccacgcccgtgacggcagcatcctggctggctcctgcctctatgttggcctgcccccagagaaacccgtcaacatcagctgctggtccaagaacatgaaggacttgacctgccgctggacgccaggggcccacggggagaccttcctccacaccaactactccctcaagtacaagcttaggtggtatggccaggacaacacatgtgaggagtaccacacagtggggccccactcctgccacatccccaaggacctggctctctttacgccctatgagatctgggtggaggccaccaaccgcctgggctctgcccgctccgatgtactcacgctggatatcctggatgtggtgaccacggaccccccgcccgaagtgcacgtgagccgcgtcgggggcctggaggaccagctgagcgtgcgctgggtgtcgccacccgccctcaaggatttcctctttcaagccaaataccagatccgctaccgagtggaggacagtgtggactggaaggtggtggacgatgtgagcaaccagacctcctgccgcctggccggcctgaaacccggcaccgtgtacttcgtgcaagtgcgctgcaacccctttggcatctatggctccaagaaagccgggatctggagtgagtggagccaccccacagccgcctccactccccgcagtgagcgcccgggcccgggcggcggggcgtgcgaaccgcggggcggagagccgagctcggggccggtgcggcgcgagctcaagcagttcctgggctggctcaagaagcacgcgtactgctccaacctcagcttccgcctctacgaccagtggcgagcctggatgcagaagtcgcacaagacccgcaaccaggacgaggggatcctgccctcgggcagacggggcacggcgagaggtcctgccagataagctgtaggggctcaggccaccctccctgccacgtggagacgcagaggccgaacccaaactggggccacctctgtaccctcacttcagggcacctgagccaccctcagcaagagctggggtggcccctgagctccaacggccataacagctctgactcccacgtgaggccacctttgggtgcaccccagtgggtgtgtgtgtgtgtgtgagggttggttgagttgcctagaacccctgccagggctgggggtgagaaggggagtcattactccccattacctagggcccctccaaaagagtccttttaaataaatgagctatttaggtgca

SEQ ID NO: 56 - DNA, 1716 bp, Homo sapiens
  Genbank Accession No. AF059293
cgcccagcgacgtgcgggcggcctggcccgcgccctcccgcgcccggcctgcgtcccgcgccctgcgccaccgccgccgagccgcagcccgccgcgcgcccccggcagcgccggccccatgcccgccggccgccggggccccgccgcccaatccgcgcggcggccgccgccgttgctgcccctgctgctgctgctctgcgtcctcggggcgccgcgagccggatcaggagcccacacagctgtgatcagtccccaggatcccacgcttctcatcggctcctccctgctggccacctgctcagtgcacggagacccaccaggagccaccgccgagggcctctactggaccctcaacgggcgccgcctgccccctgagctctcccgtgtactcaacgcctccaccttggctctggccctggccaacctcaatgggtccaggcagcggtcgggggacaacctcgtgtgccacgcccgtgacggcagcatcctggctggctcctgcctctatgttggcctgcccccagagaaacccgtcaacatcagctgctggtccaagaacatgaaggacttgacctgccgctggacgccaggggcccacggggagaccttcctccacaccaactactccctcaagtacaagcttaggtggtatggccaggacaacacatgtgaggagtaccacacagtggggccccactcctgccacatccccaaggacctggctctctttacgccctatgagatctgggtggaggccaccaaccgcctgggctctgcccgctccgatgtactcacgctggatatcctggatgtggtgaccacggaccccccgcccgacgtgcacgtgagccgcgtcgggggcctggaggaccagctgagcgtgcgctgggtgtcgccacccgccctcaaggatttcctctttcaagccaaataccagatccgctaccgagtggaggacagtgtggactggaaggtggtggacgatgtgagcaaccagacctcctgccgcctggccggcctgaaacccggcaccgtgtacttcgtgcaagtgcgctgcaacccctttggcatctatggctccaagaaagccgggatctggagtgagtggagccaccccacagccgcctccactccccgcagtgagcgcccgggcccgggcggcggggcgtgcgaaccgcggggcggagagccgagctcggggccggtgcggcgcgagctcaagcagttcctgggctggctcaagaagcacgcgtactgctccaacctcagcttccgcctctacgaccagtggcgagcctggatgcagaagtcgcacaagacccgcaaccaggacgaggggatcctgccctcgggcagacggggcacggcgagaggtcctgccagataagctgtaggggctcaggccaccctccctgccacgtggagacgcagaggccgaacccaaactggggccacctctgtaccctcacttcagggcacctgagccaccctcagcaggagctggggtggcccctgagctccaacggccataacagctctgactcccacgtgaggccacctttgggtgcaccccagtgggtgtgtgtgtgtgtgtgagggttggttgagttgcctagaacccctgccagggctgggggtgagaaggggagtcattactccccattacctagggcccctccaaaagagtccttttaaataaatgagctatttaggtgc

SEQ ID NO: 57 - DNA, 40668 bp, Homo sapiens
  Genbank Accession No. AC003112
gatctgcccgcctcgacctcccaaagtgctgggattgcaggcgtgagccactgcgcccggcccccatggcttattctaatgtagatgggcaacaatgcaaatatacaggacctgttccccatattcgacaccgaaggcaatacccaggacaatatagtgtgtgccaatggttactggaaggcttaggccatttctctttctgtcgtccccacctcactgggaaccatttcacctatcatttctcttgtttaggatcagcaatccaaactacggagctcttccactcagggtaccactcgcatttgtgggagttaagtaaaataatagaccatcgactgggagatcaaaagtagtattcttaagatggaaagcggggacaaaaggctgtagtgcatgagacactatttcagccttggcccaatcccctgttgccccccgccttaaaattgctatgtctatgtacaatctttaaggagttcatcttactggggcagtttcaagctcagaaatatgctaactggagccttgtaaaccacctaagaatacaccccaaacttagaacccactcactggaacaaaaactttcgggcgcactggtaagaggccgctaaacccagcagcctggcctccttctttgtggctaagaagggagggaaaagaatgtggttgaaactgctacgtcggtaagcacaattaaatctgataagcagggttccatgggtgattgtgcaccctggaaaatggacactaaaacagtaggggacctgctagaaccagtgtccactgggaatgactaggggtgcgggcatccctatgctttcctttcagatgggagattttccctccaaagtgaagtcgcccctgaggtgtattctgaataactgggaccaatttgatccccagacattgaagaagcagctcatatttttctgcagcactgcctggccacaatatcctcttccaggaggagaacgatggccacctgagggaagtatacactataataccatcctgcaactagatctgttttgtaaacaagaaggcaagtggatttaggtaccatatgttcagacctttttctcattaagggatgataacccacgattgtgtaagacatgtaacctgcaccccacagggagtcctcaaattctacccccatacccagtcctccccacggctcctcctactaatgccaaaccctctctggcttctacagcccaaaagggaacaaataaaagagccttcagagagccaagagaccccactggcccctggctatgtcctcttcaggctgtaggaggggaatttggcccaacccgagtacatgttcccttttctctctctgatctaaagcaaattaaggcagacttggatgaaagttctcagatgaccccaatagatacgtagatggcctgctgggtctgggacaatcttttgacctttcctggagagagatcatgttattgcttgatcagacctaacctctaatgagaagaatgctgctttaacaggagcccgagagtttggggatacctggtacctcagttaagtaagtgatagaatgacatcagaagagagcagtttcctactggccagcaagcagtccccagtatggatccccactgggaccctgactcggatcatggggactggagtcacaaacatttactgacctgtatcctagaagggttaaggagaactaggaaaaagcccatgaactattcaatgatgtctactataacccaagggaaggaagaaaaccctattgccttcctcaaaaggctgagggaggctttgagaaaatatactcccctgtcaccagattccctcgaaggccagttaattttaaaggacaaatttattactcagtcagctgcagacattaggaaaaagctccaaaagttagccttgggccgagcaaaatttggaggcatcattaaacctggcaacctcagtgttctatcatagggaccaagaggaacaggccgaaaaggaaaagcaggataagagaaaggctgcagatttagtcatgccctcagacaaaccttggcggttcaaagaggagaaaaaatggagcaggccaatcacccagcagggcttattatcagtgcagtttacaaggacactttaaacaagattgtccaaagagaaataagccgccctctcacccatgtccactatgccaaggtgatcactggaaggcacactgtcccagaggacaaaggttctctgggccagaagtccccaaccagatgatccagcaacaggatggagggtgcccggggcaagcaccagctcgtgttgtcaccctcacagagccccgggtaagtttgaccattgagggccaggaaatcgactttcttctggacactggcacagccttctcagttccactgtcctgccctggatggctgtcctcaaggtctgttaccatccaagggatcctgggacaacctgtaaccaggtatttctcccgcccccttagctgtaactgggaaaccttaattttctcacatgcctttctcatcatgcctgagaatcccatacccttactggggagggacatattagctaaatcaggagctatcatctgtatgaatacagggaagaaaagacctatctgttgtcccctacttgaggaaggaatcaaccctgaggtttgggcattagaaggacaatttggaggggcaaagaacgcctgtccagtccaaatcaaactaaaagaccccacccctttcccttaccaaagacaataccccctaagacctgaagctcgaaaaggattacaaggtattgttaaaaatttaaaagcccaaggtctagtaagaagttgtaacagcacctgtaacaccccaattctaggggtacaaaaaccaaatggtcaatggaggttggtgcaggacctcaggctcataaatgaggccataattcctttatacccagctgtacccaacccttatagattgctctctcaaataccagaagaagcagagtggtttacagtcctgaatcttaaagatgcctttttctgtatccctctacaccctgactttcaattcctatttgcctttgaggatccctcagatcaaacatctcagctcacctggacagtcttgccccaaggatttagagatagccctcacctgtttggccaagcattggcccaagatttaagtcacttcttgcacccaggtaccctaattcttcaatatatggatgacttacttctcccgttgagagaccctgtgccatcaggctacccaagactttttttttttttttttttgagacggagtcttgcactgttgcccaggctggagtgcagtggcgcaatctcggttcactgcaagcttcgcctcctgggttcatgccattctcctgcctcagcctcccgagtagctgggagtacaggcgcctgccaccacgcctggctaattttttgtacttttagtagagacagggtttcaccttgttagccaggatggtctcgatctcctgacctcatgatccacccacctcagcctcccaaagtgctgggattacatttgagcccaaggccttttaaactttctagctgatcgaggttacaaagtatctaaatcaaaggcccagctttgtttacagcaggtcaaatacctagggctggttttggctaaaggaaccagggctctcaacaaaaaacctatccagtctatactggcttatcctcaccctcagacattaaaacagttgacagggtttcttggaataactggcttttgccaactgtggatccccagatacagcgaaatggccaggccactttacactctaattaaggagacccaaaaagctaatacccatttgatagaatggggaccagaggcagaggcagccttcagaaccctaaaacaggccctaacacaagtcccagttctgggtctacctacgggacaaaatttctctttgtatgtcacagaaagaatgggaatagttcttggagtccttacccagacttgagggactaccatacagccagtagcatatctgagtaaagaaattgatgtggtagcaaaggactggcctcactgtctgcaggtggtagctgcagtggccattttagtattagaggctgtcaaaataatacaagggagagacatcactgtatggactattcacgatgtcaacggcatactaactgctaaaggaggtttgtggctgtcagacaatcgcctacttaggtaccaggccttattacttgagggactggtgcttcagatgcgcacttgtgcagctcttaacccaaacttatgctgcccagaaggatcttttagaggtccccttagccaaccctgacctcaacctatatatatactgatggaagttcgtttgtagaaaagggattacaaagggcaggatataccataggttagtgataaagcagtagttgaaagtgggcccctcccccagggaccagcacccagttagcagaactagtggcgcttacccgaactttagagctgggaaagggaaaaagtataaatgtatatacagagagcaaatttgcttatctagttctacatgcccatgctgccatatggaaagaaagggagttcctaacctccggaggaacacccattaaataccatgaagaaattatgaaattattacaggcagtgcagaaacccaaggaagtggtagtggccttgcactgcaaaggccatcagaaaggcaaaggaaaggaggcaaaaggaaatcgctgcacagacgctgaggccaaagttgccgcaagacgggacctcccattagaaacacctatggagggacccttggtatgggataacccccttcaggagaccaggccccagtattcccctgcagaaatggaatggggactttcatggggacatagttttctcccctcggggtggctagctactcaggagggaaaggtgcccatacccgcagctaatcaatggaaaatacttaaaaccgttcaccaaacattccataggggtattgagaatacccatcaaatggtcaaatctctgttcactggacgagacctccttaaaaccatccggcagacagtcaaggcctgcgaagtgtgccaaaggaataaccccttggtccattgccaagcccctcatggagaacaaaggacagggcactaccctggagaggactggcagttagatttcacttatatgcctaagtcacggggacttcaatacttactagcctgtgttgataccttcacgaattgggttgaagccttcccctgtaagacagaaaaggcccaggaggtaatcaaagccctggtccatgaaataattcctaggtttggacttccctgtagtttacaaagtgataatggcccggctttcagagccacagtgactcagggaatttccaaggcgctagggatacaatatcaccttcattggccgggcgcggtggctcacgtctgtaatcccagcactttgggaggccgaggcaggtggatcacgaggtcaggagatcgagaccatcctggctaacacagtgaaaccccgtctctactaaaaatacaaaaaatttagccgggcgtagtggtgggcgcctgtagtcccagctactcgagaggctgaggcaggagaatggcgtgaacccgggagatggagcatgcagtgagccgagattgcaccactgcactccagcctgtgcgacagagcgagactccctcaaaaaaaaaaaaaaaaaatcaccttcattgcgcccagggaccacaatcctcagggaaagtcgagaagattaatgaaacactcaaaaggcactcaaggaaattaacacaagaaactcacctcccatggaaactcaccctcttgcccatagcattattaaggatcctaaattctccccacaagataggactcagtccttatgaaatgctatatggacagccttttctcacaaacaacctcttacttgattgagaaactgccaacttggtcaaggacataacttctttggctaggtaccagcaaatcctaaagacattacccgagggatgccaccgagaaaagggaaaagcatcgttccatcccagggatctagtattagtcaagtccctcccctctacctccccatccctagatccatcgtgggaaggaccatatttggttatcctctccactccaactgcagtcaaggtgattggagtggagtcttggatccatcacacctgaatcaaaccttggatacagcctgaaaaacccgcagaatcattagcttgggaatctaagagtcagccagacaaaccttcttacacccacgagccattggaagacttatgtatcctctttcagaaggaaaattaatcagtgctcataagttctacctcagttcttgttttaaaaacagaatgtactctaacatcctaacattccttgcctttgcccaagtcttaacctttccccgctcaatgtcttcccctaatcttgagggaattattattattattattattttttttttttttttttgagacagagtctcgctctgtcgcccaggctggagtgcagtgacgtgatctcggctcactgcaagctctgccttccgggttcacaccattctcctccctcagcctcccaagtagctgggactacaggcgcccaccaccacacctggctaattttttgtatttttagtagagacggggtttcaccgtggtctcgatctgctgacctcgtgatctgccctcctcagcctcccaaagtgctgggattacaggcgtgagccaccgtgcccggcctaccttgagggaattataaacatgtcctccaggtttttatttgaagcacttcccaatcagagtaactcatcctgttgggtttgcatgaaccctaatttcccccttatatacagcagttccggcccccctcaacatatgggtggaaagctctgaggcctcatacatagctaacacttctaagggtccaggattttttcatcctagtgataggtccaatttccctgacagggctcaagcagccttaaaagcagccgccgccattctccgacaattcgctctatcagctatcccaatcataggttctgtgggcacaataacctccttctcttcgcctccactcctttgtatctcccatcaagtgttcccatgatcacaaggtgtgggacacgtggctggctgcaactatagcttgccttggatatagagttcaaatattctaattcttacagtacgactactggcaccccaatgttttgtggaaataaacatgagttccttggaaaccctatttcagtcacctatcccttaagatttaccaccccaagccaaataattcccccaccagaggccaaaacaacaagcaattactgctggggcagacttccttttgcccaggatatccccctcctgggacttggttcctctctcacaggcaaagggttaaaaaaaccccattgcttcctgcttcctgtctggggtgcgcgagtttttctttttgttgttgttgttttgttttgtttttgagatggagtctcgctctgtcgcccaggctggagtgcagtggcgcgatctccctcactgcaagctccgcctcccaggtttgcaccattctcctgcctcagcctcccgagtagctgggactacaggcgcccaccaccacacccagctaattttttgtatttttagtagagatggagtttcaccatgttagccaggatggtcttgatctcctgacctcgtgatccaccagccttggcctccgaaagtgctgggattacaggcgtgagccactgcacccagccgagagtttttcttaatgcagctagccaccggtttgccttacaggaaccccataatacgtccttggcaaattctattcagctccaactgctaggagtggcccatttgtcctgaaccctcaaatcatgggaatgagaaatgaatttagactgaccacagcccttatgagttttcagctacaggggtgtatagaaccctgataaggagttttctttgtgtgtggaagatccttctatatttgcctccccaccaactggacaggaacttgtactttagcctacatagtacctcctgtgacttattccttttcagaagaggcagtagctgtgcccattcatgctaagcttcagccgagagcaatctcactacttcctctattggctggtttaggatttactaccacctaggaagtggactcacagcctagatgaaatctctctccaacttactcaaatccaggaccaaatagactcattagcagctgtggttctccagaaccagtgagcactagatctccaatctcctcactgccgaaaggggaggaacatgcctttttctgaacaaggaatgttgtttttatgtcaataaatcaggcatagtgagagatggaattaaatgacttcaggatagagctagcagactacatggtgggacaaccgaaactacctcagggttctcacagcctgttctccactggcttcttccatttttaggtcccttccttatgattattctaggagtaacctttggcccatgtcttttcagttccttcatcctttcgtttcttcctgaatagaatcaatgaaactagaaatgttactgcagatggaacctcagatgacttcaaccagcacctattatcaaggacccctaaaccagcctgccggcccatacccggacgttgacacccaaaccacctctcacgaggaaacctcagctacagaaccccttctatgcccctattcagcaggaagcaattagagtggtcatcctcccacaccccaacagcagttgggctctcctgttgagagaggggactgaggggtggagttggcaggatttactgggcaggtttggggactttcacagaagacccctgtgactcagtgttttgagttcttaaccaatcgagtgaaggattcagaattaaccactccaggccgggcgcggtggctcacgcctgtaatcccagcactttgggaggccgaggcgggcggatcacgaggtcaggagattgagaccatcctggctaacccggtgaaaccctgcctctactaaaaatacaaaaaattggccgggtgtggtggcgggcgcctgtggtcccagctactggggaggctgaggcaggagaatggcgtgaacccgggaggcagagcttgaagtgagccgagatcgtgccattgcactgcagcctgggcgacagagcgagactctgtctcactaaaaaaaaaaaaaaaaaaaaacaaaaaaaaaaaacactccagaggaggattgaaaaaagaaccactctcaatggacaaaaagaaaggggaggggtaacatagggatatgagccctagccaccggagccagcaacggcaacccttccgggtccccttccagcatgtggaagctttcctttcgctttgttcaataaactgccctgctgctcactctcctggtccgtggactctttttgatctgtaacacacaccgcgaaggtccacagcttcattcttcaaagttagcgagaccacgaacccatcggcaagaaaaactcccaactcactaacagcctagtcccttcccccttaaaggctggtgtctgtcaccccatacctgagctggtccctcttcactaagtcaggctaccagcatcttcctgctcctccggctgggcccctggaggaggaagctttccaaagctctgtctagcccatgtatccctccagcaggaagctccaaggcctcctctgtactttgaggtcgttctggcccctgctatgctccaggctcagggctattacacaagacacccaattcaactcggtgggctgttgacaccgtccctgtcactgaatcttgtcttcacccctgtgattctctgaagagccagtgaatctctgttaatgttggtggagttccagccactgcactttttttgaggcagactcactgtggctccggctggagtgcagtggcatggtcatagctcatggcagcccccaactcccgggctcatgtaatcctcccacctcagcctcccgagtagctgggactggaggcgggagccaccatgtcgggctaattggtttttctgtagagatcgggcctccctaggttgcccaggcttacttaacactcttgaacgtcaaaacccacgctcagtacccgcttcaagtggaagtcggtgttgagatacaagcataggaacgaactcaaggctaacagctgttctgtattcagagccgcacaatcaaggaaaaacacgatcggaggcgggccctggacgggaacaagaagggtgggcttgactgggcggcccgcggtcttggttcccctttcttccttctggctggccggccgcagggtagggggtccgtggacctcccggcctgtagggggcgtcgggcgcagcggaagggcctgctccggagcctggccagggctgcgcagtcatgatcaccgagaccgcggcggagcctacggtccctgcagtgcctgctgctgaggaggccaccgaagctcggggacgcgaggagccggcgtggccctgggtgagcccaggcccaagcgggaacgggcgcggggcgggcggcgcagacccaggggcgcgggcttcatgccccagccgtgccccctgtcccgcagaaagacgccccgatccggacgctggtgcagcgcatccaccagctgcaggctgagcgcgcgcagggcttccgccgactggaggagtgagtgggggcgcggaggggctcagggttcggtcccccgcccgctccgggcgtgggcgtgttctcggcgggcgtgcctggaggaggagctgggtccttgtgtggctgcagagtcagatggggcggggatttcggggcaccgggtcctcaccttcacgaaaaaggccccacagcacgtccccactacccgacgactcactcttcgtggcttctctctcctccccaagagcaggggtgggcctgtctcgcgttcccctgcgggagtcaggaagcgtccttcctacctaccagtcctcccctctggtgtctggggacacttcctgggggcctttcaggtggttggcgccggtgcagggcctgagagcctgggggcgcggcctcagggtccccacatgccgcagaggccaccgccagtacctgcgcagcggccctgactacgacttcgcgcgctaccggagcacagtgcacggggtgacccaggccttcgccgccgcctcgcgggaggtgctggcggtggaagcagagctgggcgggcctcgcaggcagccgctgctcgccggccacgtgcgcagcctgcaggagctggagcagacgcggctgggcacggtgaggccaccaccccttccccgccgtgtctctaggaccctggccggctcctctcatgacgcacccctggttggggggtggtcccagtatcccatacacagacctcaccccttcctgtcccaccccaatcctctattaaggcttcacttggggattctcggaccttgccctctgctgttcatccccaatttttttcccaagttttgtccttattcccagagcactcccgctttctcccagctccgcctaaatgctattccaagatgcccagatcccgccccaacaatgctccacccactctggttgttccgcgtctagggtcccaccctcaacctcccgtagatacaggcgaggggggtcccaggccacgcctcctccgtattattcctccatcacagctttagttctttgcctatttctctcttgcgatccgcctgctcggccctgcaaccgtgtgtgactggaattcctaggccacgccccccatgagcgacccgtctcagcgtctctttggcctttttctttctggtgttttttttttttttttttttttttaagacaggctcttgctctcttgctctctcacccaggctagagtgcaatggcgcgatctcggctaacggcaacctccgcctcccagattcaagcgattctcctgcctcagcctcctgagtagctgggattacaggcataatttttgtattttgtattttttttagtagagacggggttgtgccatatgggcaaggctggtctcgaactcctggtctcaagcgatccgccctcttctgcttcccgaagtgctgggatttcaggcgtgagccaccgcgtccaggctttttggcctacttttatcctgggtccccgtccctgggaccatgaggcgcaacctaacccacccctacggccaatgcctggctaagacgtcactgttgttcccaggccacgcccacatcgcgctcagcactgcctctggcctgcctgctgtctcctttctgagagagcctctaaactgaatttcggactcttcctacacaaagcactgcccctcgtggttctacccgggcactgcctttctgggtgcctctgttttttcctgaacatccttggagggcagggggtgggttctgctcgtggagacatccttcgtgttgctcattcccccaccaggtggccctgctgcagttgatggagacgccagagctggcggggcaggaggacgctgtacggatgcagcagctgaaaatgaagtgagcgctgctgcccaagccgcctggctatgctcgatttgcaccagggttggcacggtcaggacgctgccagcagaggaaccctctgccagtgcacaatggtgttctcacctggtggccctcagatgtacacttccccagagggcacagccgtgaaacttcacatcagtttcgctgtgcattgctgggacactgctgtatacctcgacacatgccaatcctgcacacgtggctgtccgtggagcttggacatgccccactgagcacagaccttcagatgcctgtcctcagcccccaagcacacacactcatgtacacacacatttgacaaagtcacacttcataacctcctaatggtacacaccccaccaagatggccttttcttttcttttttttctgagatgcagtctcactctgtcaccaggctggagtgcagtggcgcgatctcagctcactgcaacctccgcctcccgggttcaagtgattcccctgcctcagcctcctgagtagctgggactacaggcgcgtgccaccacgcccagctaattttttgtattttagtagagatgggtttcaccatgttggccaggatggtctcgatctcctgacctcgtgatctgcccacctcagcctcccaaagtgctgggattacaggcgtaagccagcacgcctggtcctttattttcttttcttttttctttcttttttttgagatagagtcttgctctgtcacccaggctggagtgcagtggtgcggtcttggcttaccgtaacctctgcctcctaagtagcttggattacagatgcccgccaccatgcctggctaattcttgtatttttagtagagacggggattcgccatgttggccaggcttgttttgaactcctgacctcaggtgatctgcctgcctcagcttcccaaagtgctggattacaggcgtgagccaccatgcccagcccagatggccttttctctcagcccactgtgacctatggggccaccccttctccctagcacctaagtgttccctcttgctgctagtgctgcctggaggtttggcggcgggcaggagggcctggggctcaccacagccacagccctcttgcagcttcgcggcagcagctaattcaccccatctgggttttatttatagttcccatccgctcttgtagggtaattaaaaccatggaggcgatcagcgaggttctccaggaccttaggtttgatgcggaatctgccgagtgatggcggctccccagggatgcgccgagggagatgggaaacggggcggatggcgcccagcccagccctaactgccagctggctggggttgcgccccactgcgctgctgaccttcctgcagttccagacacctcccacaataaagagctcctcctctgtagccgctctgccatctctgtgtacaagggtgctgcagccagtgtgcctagggagggggcccccacagggccagggattgtgggtagaagactcccaccctccctagaaactgaggtttttttgcttgagacagggtcttgctgtgtcacccagactggagtgcagtggcgagatcgtggctcactgcagccttgacttccccaggctcaagcagtcctcctgcctcagcctcccaagtagctgggactacaggcacatgccaccacaagcccagttaattttttttttttttgagatagagttttgctctttttgcccaggctggagtacaatggtacgatctcggctcactgcaatctgcacctcctgggttcaagtgattcgcctgcctcagcctcctgagtagttgggatcacaggcatgcaccaccacgcccagctaattttgtatttttagtagagacggggtttctccatgttggtcaggctggtcttgaactcctgacctcatgtggtccacccatgtcaacctcccaaagtggcgggattacaggcgtgagccatggcgcctggccaattttttgcttttagtagagatgaggtctccctttgttgcccaggctggtccccaactcctggccttgagcagtgctcccagcttggcctcctaaagttctgggattacaggcatgagcctttgcagccagccagctcaggtattttgaatcacattctccaaggagttcagaatcagaccttgcaaatactggatagacagtctgaagtcctgggaggtgaaaattctaatctcaaagggtcattaagacgcctcacattcccctcaaatctcacagcccccaccccaggccaggcaggccccaaactcaccttcacaatcacagcacctaaatagctcatttatttaaaaggactcttttggaggggccctaggtaatggggagtaatgactccccttctcacccccagccctggcaggggttctaggcaactcaaccaaccctcacacacacacacacacccactggggtgcacccaaaggtggcctcacgtgggagtcagagctgttatggccgttggagctcaggggccaccccagctcctgctgagggtggctcaggtgccctgaagtgagggtacagaggtggccccagtttgggttcggcctctgcgtctccacgtggcagggagggtggcctgagcccctacagcttatctggcaggacctgcaggcagaggggaagccaagctaagcagggagtccaggagagggccgcaccacagagccactgaaggaggcttcattcgtgtcctgtccccaccgcttctggctgtgtgactttgggcagggtcctgcccctctccgggccttggcgaggctatctgagctgcaggtaaagcacttggcgcggagccagtatgcagtaggcgcccatgcgtgctaactagggtgagtatgttcattcatttcggaggagattccacttcggacattttcagggcattgaatgttcttaggctaaaggagacaatgccagttatacagtaagtgctaagtaaatgctgatgaataacaaaggaagaggacggattccatctcagcgactctaaggctggggttgggaggcgtgggggtgtgaacaagacctgcagccaccggaaggggccctccccttgctccctcccgcccacccattcaggcccaccttacctctcgccgtgccccgtctgcccgagggcaggatcccctcgtcctgtgcttggaaggaaggcagaggtgtcgtgggggctgcagacctgcgtccacagcctgctgtcttccccctcccctgttttctgggcccccccagctccctgtccccacccccacgcccgagggtccctccttcctacctggttgcgggtcttgtgcgacttctgcatccaggctcgccactggtcgtagaggcggaagctgaggttggagcagtacgcgtgcttcttgagccagcccaggaactgcttgagctcgcgccgcaccggccccgagctcggctctccgccccgcggttcgcacgccccgccgcccgggcccgggcgctctggtggtgggcggagcggcagtgtcagagcgcgcccggcagggggtgcgcgcgggcaggagaggggagaccccggcgcggcgggaccatgctcccctcggggaacctccctccccgtttctcaaggaccgagtcctccccgcggccctgcacagcagcccagctgcgcccctggcccggctgcgcccctggggaggtgggggggagggggaaggaaggggctcctcctccacatctcctccaggaacccgattcctgtggcctgagccaggtgcgagtggagtggggggaggggagaatgagagaggccagagccggggggatgagacatagagatagacagacagagcagggggccgaaaaagagaaagggagaaagacgcacggatgagagagccggggccagggatggagagatggagacgcagggtgggtgaaagccaagggtgtcagcccaggaggaaagggcctgatcagggtaggacagaaaccctggggacatagggacaaagagatcgagacagagacacagaggaagagtgacagatgaagggagaccgagtgcaagatgaccccatgggactgtccccagcatgggcccatgggacagggagtgggccaggagggccaggtgggaggcctgcctgtcggtccagctgccggctgcagccagcccccagcaggccggcggataaggacatcggcctcacgtcataaataaagccggggacccgctgacaggccctggcacggccccggcccccgccgcccctgctggccttccccggcctccccagcctcccctgcggacgcagcggcctgctggctcctgtgcaagaatcgcaggtgccgggcacgagcaggggccaaggctcaggcccctcccggctgcgcttgctcccgcccacccctgaacctggaggggcccaggataggggctggggagctggctggagcctgactctacccctccctagctctgggaccctctctgggcctcagtttccctatcatctcacgagccagagtgagcttggtcttcccggtgaactaagtttagacctgtgtgacctcctagagcctcagtgtcctcacctgagaaaaagcggcctcccttgcagtgaaaccctggggggatgggacaataagtacctccatgccaactgcctgcaaacacttaggtggcacccaccatgtgggcacttgccacaaattatgtcatccaaccctcataacagcccaaggcaagtgggattctcgaccccaccttccagatggggaaacggaggccagacattccaagtaacagctttcgtttcatttcacaaaagagagactagaggcctgtggacccggagaaatcccagacagcaagaggaagcagacctaggcacctaatcattcccatccccctgccttgatcagaaggagaaattgaggcccatcaaagtgggagttggcagcccattggccttagaagcaggggtctcaaactcactggccccctcttaggagggagtctgagtggccaaaacagaccagatggggatgggcaaatggagagtgagggtcctgagaaggggagaccactgctggtgggggctgtaggccatgctgttacattttctagataatttatttttctagggaatctaggatatttgtgtaaaaacttcctgggtttaaaatttctactagttggtcaaactttttttttgttttccaaacaacaggccaaagaaaatagatccaagggccacattcagctctgggggggccaccagtttgagacttctactctcttggagacaatcaggaaacaggctgggcatggtgtctcacacctgtaatcccagcactttgggaggccgaaatgggcagatcacccgaggtcaggagttcgagaccagcctggccaacatggtgaaatcctgtctctactaaaaaatacaaaaattagctgtgcatgttggcgcgtgcctgtagtcccagctacttgggaggctcaggtaggagaatcgcttgaaaccgggaggcagaggttgcagtgagtgcagatcacaccactatgcgacagaatgaggccgtgtctcaaaagaaaaaaaaaagaaaagaaaacaaggaaacagaggctctagctggtttcggactggccgctggatcacccagccctaggagggtgctcaccactgcggggagtggaggcggctgtggggtggctccactcactccagatcccggctttcttggagccatagatgccaaaggggttgcagcgcacttgcacgaagtacacggtgccgggtttcaggccggccaggcggcaggaggtctggttgctcacatcgtccaccacctggacagtgaggacaaggtcagagtagagggcggggcctagcaggagcgggggcggggcctggaaggaacaggggcggagtcagggaaggggagggtcaccttccagtccacactgtcctccactcggtagcggatctggtatttggcttgaaagaggaaatccttgagggcgggtggcgacacccagcgcacgctcagctggtcctccaggcccccgacgcggctcacgtgcacgtcgggcggggggtccgtggtcactgcggggcagaggagggaccctctcagcctgggactgtctgggtttaactccccccagcagtgtggcccagggcacttggcctagatggaacctgcctctgttttcctcctcttccctctgcccccacccccaggactggtggattacacgatatataatattggagaaacactcagcacctaattaatgttagctgttatcaccattattatctgtgacgggagaaacataatcctatcttcaactgactatgggaaagcagccattgcggggttgatgatattattattatcatgcttaggaggccaggggctgtcaggccgtcagccttctgggaacctccctgccaccccctccccactcacacctcccttccactcttttttttttttttttgagacggagtctcgctctgtcgcccaggctggagtgcagtggcgggatctcggctcactgcaagctccgcctcccgggttcacgccattctcctgcctcagcctcccaagtagctgggactacaggcgcccgccactacgcccggctaaattgtttgtatttttagtagagacggggtttcaccgttttttagccgggatggtctcgatctcctgacctcgtgatccgcccgcctcggcctcccaaagtgctgggattacaggtgtgagccaccgcgcccggccctcccttccactcttactgaaatctttgatgtgacattttgctgggtgcagagaagcaactgaggcttagaactttcccactgtagcgttaggatgtggggaagagtgaggcaggctgcgggggcagggatgggggctacaacccaggcgtatgtgtgtgttggggggttctgaggatccttctgggggcccctgagggcagcagggtgagctggcctctccccctgaggccttggtgaggggcctaaagggttaaggcacaggcctgcttggggctgagaaacaccctaattagattaggctcaattctgctcacagatcatccatttcctgcctcccgccctgcgccccccagctccaggcctcggcttcctggggcgcctcccgacctgggcgccccctcccctctccccagggccccctcctgcacacctgggctgccgagggggtggtggccaggccaggtgttctctgtggagtgggggtatcctggctgtttctgggggctgcggactgatgagcggatgctcagctacttacctaccttccctctgaccagcagggacaacccgggagttgccgggctggggaggggcaggtgggaccctaggaaaaatgagaaggtgcaggggacccctcgggatgctcggtgggtggggctggtgccgagggaggggcctagcagacactgggggctcacccacatccaggatatccagcgtgagtacatcggagcgggcagagcccaggcggttggtggcctccacccagatctcatagggcgtaaagagagccaggtccttggggatgtggcaggagtggggccccactgtgtggtactcctcacatgtgttgtcctggccataccacctgcggggatgggagggcgacaggacgcatgagggttccttgtggcccccagacctcaccatggcagcctcagggtgcagacaacacatgggggctcagagagggtccgcgttggtcaaggtcacgcagccagcctgggacacacacatcgccctcaggccaccaccaacctaagcttgtacttgagggagtagttggtgtggaggaaggtctccccgtgggcccctggcgtccagcggcaggtcaagtccttcatgttcttggaccagcagctgatgttgacgggtttctctgggggcactgggagaaggggagggtgcaggaagcaggctgagggtctggactagctgagcctcggctgaggggttgctgcccacccaccaggcccccaccttggagtggaaggagggcagacaggacagtctcagccctgtgctgagaaatgccagcacagttggtgtgacaactgcaagggctcttgagaggctggtgactcgatctccgggttctttttcttttttcgaggcaaagtctcgctctgtcccccaggctggagtgcaatggtgccatctcagctcactgcaacttccgcctcctgggttcaagcaattctcctgtctcagcctcccaagtagctgggattacaggtgcctgtcagcacgcctggctaagtattgtatttttagtagagatggggtttcgccatgtaggccagcctggcctcgaactcctggcttcaagtgatccacccacctcagcctcccaaagtgctgggcttacagacatgagccaccttgcccgaccgggtctccaggttctcattcccacctgaaagacctgcatagccatgccagtgtgcccacagctcatccccaggccagaaggcccacaattcatgcctcactccagagggagatgccgctcccaagagctacccctggggtgtcctgggtgccaacttacggccaacatagaggcaggagccagccaggatgctgccgtcacgggcgtggcacacgaggttgtcccccgaccgctgcctggacccattgaggttggccagggccagagccaaggtggaggcgttgagtacacgggagagctcagggggcaggcggcgcccgttgagggtccagtagaggccctcggcggtggctcctggtgggtctccgtgcactgagcaggtggccagcagggaggagccgatgagaagcgtgggatcctggggactgatcacagctgtgtctggggtcaaagaggaacacgtgtcaggccagggcggggaccctccaagcccccaaccatgccaggacctccagggttcatggtggtcctgaaaagacgctgttaatgattgtcccccattttacagatagggaaggtagagatcagttgggttaaatgcccagggcaacactggtggccaaactgacagacctggagttgtccaggtctgtctgactccaacactggatccttccaaaactcttcatcactgacatgcttaaggttctctgaggggtcacacaactcgggcatagaggctcattcggatccaagtgactcttgcttagcacatcgttatgacaaacactatgctttgctttttttttttgagacggagtctcgctctgtcgcccaggctggagtgcagtggcacgatctcggctcactgcaacctccgcctcccgggtccaagcaattcttctgcctcagcctcccgagtagctgggacttcaggtgtgcaccaccatgcctgactaacttttgtatttttttttttttgagacgcagtcttgctctgtcgcccaggctggagtgcagtggcacgatctcggctcactgcaagctccgcctcccgggatcatgccattctcctgcctcagcctcccaagtagctaggactacgcgcccgccaccacgcctggctaattttttgtatttttagtagagacggggtttcagcatgttagccaggatggtctcgatctcctgacctcatgatccatccgtatgggcctcccaaagtgctgggattacaggcgtgagccactgcgcctggccaagttttgtatttttagtagagacggggtttcaccatattggccaggctggtcttgaactcctgacctcgtgatccacctccctcggcctctcaaagtgctgggattacaggagtgagccaatacacccaggcatgctttgctttttatttttttagcgacagggtctcactctgttggccaggctggagtgcagtggcacgatcatagctcactgcagcctcgatctcctgggttcaagtgatcctccctcatctcagctcccaagtagctgggactacaggtgtgcaccaccacacctggctgatttttaaatatttttttagagatgaggtctcgctagtttgctcaggccggtcttgaactcctggcctcaagcgatcctcccaccttggcctcccaaagtcctgggatcacaggcatgagcttcggtgcctagccttctttatttttcattctcattttgtttttcttttttggcaactagaaacaaaagattgtgggttcttcctgtgatgctcccagagcctcacacatagtaggtgtttctgtgggggaagggcactgcttaaaatgaaagccctgacccttacttgaatcattaagagcaccatgttttttttttttttgagacggagttttgctcttgttgcccaggctggagtgcaatggcacgatctcggctcaccgcaatctccgcctcccaggttcaagtgattctcctgcgtcagcctcccgagtagctgggattacaggcacacatcaccgtgcccggctaatttttgtatttttagtagagatgtggtttcaccgtgctggtcaggctggtttcgaactcctgaccttgtgatccgcctgcctcagcctcccaaagtgctgggattacaggggtgaaccaccgcgcccagcctgtatttttagtagagtccaagaatcgccatgttggccaggctggtctcgaactcctgacatcaagtgatccactcgcctcagcctcccgaagtgctgggatgacaggcgtgagtcattgcgcctggcctaacagcaccatttattgagcacttgttgtgttctgaatactgggctaagactacctacattttctcggccaatcctgcttatatgttaaagatgaaaaaactccggctctgaaagatggagtttccttgctggaatgagggaaggccatactagttaggcccagattttctggtctccaaagttctgttccacactgcctacctctggaactaaaggcagccctggcaaactgcacgtccccaactcccatccaaagggacttgacatcatcgctgtttccctccactcagttttcctcatctgcaaagtgagaacgagaaagctctttgtctcctggggtattgtgaaagtcagaggggaaaggacttcctgaaccaggttgtgtgtgagtcaggtactaggcacaggaaacttggggacgcccatgggtggttgatgcctctctctcctgctggccatcagggcagcccaggagttccccttctggagaccagaaccttgtccatagggaaaccaaggcccagaggaggagggggtgcacaggccaacctcccaatgcctctctgagtctcagtttccccatctggaaagtggacatcatggcgtcaatgtcatggggttggctgggtgcggtggctcatgcctgtaatcccagcactttgagaggctgaggtgggaggatcacgtgaggtcaagagtttgagacagcctgggcaacatggtgaaaccctgtctctaccaaaaatacaaaaattagccaggtggggagggggtggtggccccatgcctgtggtcttagctacttgggaggctgaggcaggaggatcgctggagcccgggaagttgaggctgcagtgagccatgactgcaccactgcactccagcctgggtgacagtgagaccctgtctcaaaaaagaaataaaaaatttagatttaaatttataaaaaccaacaaaacaaacctcatgaggttgtttgagaggagtgaaaatattgttggagacaatattttcccatgagatctttaaaccaagttgacctggactcgaatgcccccagcctgactcagtgttctacttttttttttttttgagacagagtctcactctgtcacccaggctggagtgcagtggcacaatctcggctcaccataacctccacacccagctaatttttgtatttttaggagagacggagtttcgccatgttggccaggctggtctcgaactcttgacctccagtgatccacccgccttggcctcccaaagtgctgggatgacaggcgtgagccactgcacccggcctcagtgttttacttctttgagcctctggaaaggggcttctcgttccacacagagtggttgtaaagactcatccacgcctttgttcgttcacgcgttcatctattcattcacagggtacctatagtgtgtccggatctgtgggcactggggtgatgcccaagacacacaaaagtcctgcccttgtgggcatcaaatccaaggaagcagcaggaaaaaggaataaataaatatctaagacaataactaggggagaaagtaaagcaggggctggaggaagacagagcagcggcagaagcttgggaggcctgtctggggaggtgacctttgagcagagacctgaataaagtaagagaagtagctgtgacattatctaacagagcatgtccaggcagtgggagctgcaagtgccaaggtcctggggcagaagcggtgggaaatgaggtttgagaggtcagagaccctgacctgcagggaggagggattccagggttctcagccggggagggagggatgcggtgagatatgcgttaaaaggactccccaggcggctggaagaagggactgcaggaggcaggggcagcccagcttcgcagagatggcagccaaggacagggtgatcctggcccccagggaggccccctgaatgccagcgctgccctgcacttgccctcactgccccagatgggcgaggtggggtggacacggttcttgggccggccctgatgattttccggggcaaacttggctcgagggctctgtctcgctggagcctggaatcgcagttgcgcttggggcttggcccagggctcgccggaggtctccgcgtccgtgcgaaggagccggctgagcgggccagagccgaggaggcgggggcggccgaggggggcggggggctgggggccaggggaccgccctggaggtcccaggcagccagccgcccgctaattcggaattccttttgcatgaactcgggtgtgccagcgtctctgccccggcccacccaccgcttcctgcctgggcccccccaacagagtgggaggcacggccaggcctgcccagaccccaggcccctctcagcccttctagagtgggtctcactcctcctgcccccaccacccgccagcttggcctgggcaggaaggggctctctggggggtcctggctggggggcgctgcccctctgccacacccgcctggcctgggccggcgtggctcacttgccagcagctgcagctgccctcccggggctgggcgggggacaccgggcggcgacgggttgtagggggaaggcaaggccaggcgggcctggacagaccaatctcccacccccttagccccagccggtaaggtcagaaggacactttctcctcccgggatatgggcgcaacaccagtgggagaacctggccaattgacttcccctctccagttctcaattttctcctccataaaatgggaggagaaatacgttctacttgctggggagatcaatgagatgtgattgcaatccaatgtccagagggctcagaagcctgaagcccccaggagctgcaaagatgacagcccctcccagctctggggtcccggctgactaggcactccctccaggcctccacaaacaatgggctaaggcgctggggacagagatgcacgcactccaggccaggcaggggagcagctgggaacagcccactgagccggagttggtgggggcttggcttggtttggagggcctcctagggctccccaaagcagatccctaggttgggcttttgaacagctcccttttcactccctgcctcccctcctttcccgcagagctggggcctttaaaagttttttctctcctcttttcccaatctggagccactgccgttattaaaaaggaacaccatgtgttttaaaagggaaaagtgtgagattctctgcaagcagggcggaagggtggcctccatcccagggtccccacgggggtccccatctcccgtcccgctggtacctgcagacactttacgacccacccgcctgctggtcaggtgctaagacacaccgtaagtagaaacatattgccgaggtgtgagaatcttttatttaatttcttccccccttaaaggaaaaaacacacttacagtgcccccccaccccctacaccttcgcctgctgctctactggctgaaaacaaagcttggcgctcacagtggcactcacaggcgctgcccaccgcctggcagagccgtcaggggccctgggagggcccgaggtagcccctcacctgaaagccaggggagagccaggctttcagcaagtgcccctagaagatgcccggaccctgccccttcccggaggagccctacaggcagcccgcaaacagcccagcacagggtggatgagcctgggagcagtgtgtgcccggcgacccccggggtggcccgtgcgcctggatggggtgcgtggagtgactgaacatctggggcgagtggtgcctgcctctgtgcccctgggtcgcctcccctgtgggatgtgtgtgaccgtgaatgtgtgtgtcggggatggaatgtgtgtgcgtccgcgatggtgcgcgaatgtgcacctgggatgcagtgtgcgcgagtttgagggcgagggtgacgggccacaagccagtgtgattctttgtgtgtctctgggtgtgtcccagagcgggtctgcatacggagacgtatccttgcgggggtgttccttggatggggggccccagagtgcctgaggccagaagtccctccagggcaggggtcttggcccgtagggcagcgggttcccagtgggccccctcaaagtttgggcccgctggtgcccggactcactggctcccgctccctctccctctcacccactcgctcacaaagattcctctcgctggaggctctccgcccgacgcagcctggctgaaaacggttctaagcgccgccggtggcggggactccgcggacccccgtgcgccgggtcccgcagggggagggcggtggcgccggcccgtggagacacaagtcccccgggaccccgggctgcgcgccaggcggccagagcggcccccctgcagccccgccctccccgtggggctcatccctccgcctgggggggcccgctgggggcccgcacccagcgcgccaaccgcgtgcgcccccgcctgggagcggtgccctgcagtcccaggggcccagagtccaccgaagcagacgcgtgcgcccgccacgtcctggcatgcagagggtctcaggccgcgatccccccagcccccgggggcctggcctggcgccctcggcccagctgcccaggtaacagggcctcgggcgcggaagcaggactctctggacagtggactgcggcgccgtgtgccccgcaggtgagggcgccccgagggctgcgccgggggcgccttcctttgttccccggccgtccaggtggcgcccgcgccccctccccccgcggctgcccccggggcgcccgccctctgctctggcaggggggaaggagtggggcgccgggtactcacgggctcctgatccggctcgcggcgccccgaggacgcagagcagcagcagcaggggcagcaacggcggcggccgccgcgcggattgggcggcggggccccggcggccggcgggcatggggccggcgctgccgggggcgcgcggcgggctgcggctcggcggcggtggcgcagggcgcgggacgcaggccgggcgcgggagggcgcgggccaggccgcccgcacgtcgctgggcgcggacgcggaggccggagcaagtctgagcagccgaattgacaaggcgctaatgcgccgctggccccgcccggccccgcccccggcccggcccggccccgggggggcggcgggccccgcaccggcctccccgccgcccgcccgcccgcgggcaccgcgcgccccgcccgtcccgcctccgccccaccgagaaccgcgcgcgccctatcccgcggcccaaagccccctaactcaacccctaccggcccaggacctccctctccaaccctgccagctccaggcttcccacccccagtctgggacccggcacccccaatcccgtttccataaccctgcccacttccctgcaccctcctctcagcccagtgcctcttcagtggcccctttggtccccaaccctgccccactcctccattcccccttccacggcccaatcttctgtctcggcccccaccccagctctggccccgccccccccaccgagcggtccttgagtcccgcctacccccatctccagcccctcagccttcccaggggcctaaaagtcacccccagccccacgccctcggcgcgcgggttccagccctcccacctcatcctgcctcttttcgattctccgcgagtagcctcggccccaggctttgctggaagaaaggagaaaaagcaggaaggcacggagtccctcgccttcgccctggctgcgctgtccccttcgcgcgcgggatgggtttgaggttgctctgggcgccccgggggcctcgggagggagctcctgcgtgggcagacggggagatgtagtcccctgtgggagccgggacccaggcctgcgcgggaactgggtcccgcaccgcagtaagagggattcccaggaggagagcggtaagaagctctttccccgggacctattcacaccccgccacggaaaaatccactcagcggcccgcgggtggggtgcgccacgcggtgagtaatcgcttcggcggccaccgcccgccgactccaggtaacgccggctgcccggagcgacgcatagtttgtcttccttcttttgcgcaaagagccttctccgtgttattatttttggccattgctcgagtttcgggacccctcccggtccgggcgtctcatctccctcctcccggtccccacccgatgcgggcgcccaggaataaagggttcctggcctccaaggctgctgcggatgggggtgcctgaaatgagagttggggggtgcaattacccacttttggtcgcagccccgcccccagctgcagcgcccagggaagggaacggctccaagtccccttttccaggagtcccttagaggcctggattctctctcctggtccccaaccagccaagggggtaaaagtgtctgaggggggctcaggagcccccatttgtctgcccaagactgaagccccaccctctcctacttaaatctccagttcagactccagactgtcaaaaaacaagattgggggatgggagcctataggggcccagggcgcccctgctccatctgaattctggatggagaagacagacaaggagagacgctgccatttacttcgggaaaccaggccttttgtgcctcagtttcttcctctgcacagtgggcaccacccagtctaggagcttctgtgggaagacgcagggcagcagaagtctctacaatccaagcccttagcacagcactggaggatatcctggagcagaggtgacccccagccctgcttgtcccctctgaaacatggagccatagtcccacctgccaggggacccagagggttaagtggaggtggcagtccttggctggaattgagtttttaggatactcaccactactcccccatggctcctgtctgcagatgctctctgtgtggatagagacgcctcactccctcctgggaggacttcaggcttctggagcaaaaccttgattttttcctccctccatttctgcttctcttccagtcattttggttttgggaaagggctctcccatccatccaggtgctcaggccagagacctggaagcgcacgtgacaactctctcctttgctcatccctcatgtccaattcatcagcaaatcctgttggctctgattctaaaacacatctccattctgagatgctgacccctttttcccaccccattcagatccaggccccacggtctccctcagggatgcttcccggcctcctccagggcctccctgataacccttctgcctttctcggcacaccaggcagagggagcttttaaaagaagaaaaagcagatctttgtcctgccaccctctcgccatcctctcccctcctcttcttccctctcctcttccccctcctctccctcattccgccccagccactggagccctgtttcccaaaacataccaggcttgttactatagaagggcctctgcgtgttggctgttccctctgctggaatgctgttccccacatcttccccagttggccctttctcttccatcacttcacaggattagtgccacctcctcagagaggccctccacccttcccccagcactctccctctccttcactttgttttattgtttttgaaacacaactcttccaaccatttcatttcttgtgcaactgattttctttagactgtgggcagcctcagcccctttggaccccagtggtgggcccagtgagggctgaaagcgaagcactcactaaatatttgtaaaagtaaaggatggagaactcttactccctccaagtagcaagaaaactcagtcctagcaagtcatgctgcctggggtcctagcctggcccacactctgtgtcttgctgtgtgaccctagccagtagacatccctctcttgttcttaccaacagaagggaaggaccattttccaatcctgcccagccccaccctggagtgtgacttctgcccttgggtgatctttaccccacacctttgacttcagggaaagggaattgaccccagagtgcatccttcccggcccttagggcccccagaagtttaaccctttactccccagttccattatctccttgaggacaaaagggagctagcgtcaatggaacttctggcaaatattgacccaagtccttgaagttggctgggaatgtgtaaggggcagaaggagggagggcctccccttgggcagagggagggcctccccttgggctgggggagggacccctccttagtcctgcaccctccactccaaggtcacctctggatgagaggtattaggttggggggggggcctccatccccagctccctcgtgattccagggcactgagggtgcaccagggagggggcagtggaaatggcaccttcagggtcctgtggggacccacaaccactgggagtgaggaaggctgagagctgtctctcccattctgaaagccccgtgctcagggctccccagtatgggattagctacctggtgttccaggcaggtgctttcaggaattaaggggcagtgagggtctggacacctggttcagggtctgtggcacaggaaagtggggcccgtgtgtacctaggctttataatttctgccctggaggctgagcctggggagaagcaatgcctgggtgctcagtgtaatgcacactggacttcaggcactggaggcgggacctggggagttgcagacctgcctaggggacctgcctgggaagttgcaggcctgccccagggaggccagtttccctgcccgtctgtaccctgagaagcctctgaagtctgggtcccaggaggcaccagctgctttagggggacagccacatccctccgtcctcccccaacaaccctcagcaaccaccaccggcgccatggtgctctgcctcctccctggcctgtaccctgcttggaggtgggggtcagcagggtcgtggtgagggcggcaagggacaaagggtgcttgtccgctgcccgccttgacctcggctgctgtggcttcccggacgcctggcctgccgctgattcacgcccaggccggcctcagcgccccccgcctgccgcccccagccaggccgccccggggggtaggaagtgggggggggggcgagggcggcgccgagtcaactttccctcttaagccccgaaggaatgtcggcggatttcctgaaacccgaccctggccgcccgccggccctcccgcccctcacctggaccggctcccccgggaacagcaggaggggcgcgggggctcaccttgggggccggggtcaagtcctctttccgctcacccccccagcggcctagtgcagcggaaagggggctgggtgtgcggcaatcagcctctttcccttctcccctcaggcgacctgggtgatcgacccactcctccagcctcagtttctccttctgcaaaagggcgcggggtgtccctcctccctgatgcgttttaagcaatgcccaaaggtcacctcccatcattggcagggctctgccggcttttctttgcttctctccctgtcacctggacagaaccactttgcagtctgagcatcagtttcctcacccatataaaagggcaacgctaccggtacctgtcttatacggttgttgcaagaaaaagtgtttcgttggaatgaatgaaagacagtaattgtggaggggttaggcgcgcgcgggcctctggaattagcatgtgtgggcttgaatcctgactttgccaacgcgtcccggagcctaagtttcccacctgtgaaatgggggacagtattggtcataacgcacagggctgtttcccaaggtgcgggcctggcgcgcgggtgggttagaagcggaattctcctgctggattctggcgcaaactgcgggctggaggccctcgccgccgggtcgcagcggcctagcatgggaggggaggggaggggcggggcggggcgggggaggggccgcaccgggatccagatgttcggggtccgccaggcacagccgcgcctgattaagccacgtgggggccggccgggggccgctgagatgaaagcgcggccgcaggccagagtagggggtgcgccgggcccccacccgggacaccctcttcccaggccgaaacctgagccgccctctaacccgcagaccctgcgaggctgccgccccgtctgcgggggcggagcgtaggtgggggacctgcgggctgctgcgcggcgctgcaggcacctgcgccaggcatgccagcgaaagcgggggcatctttgcagaggatccgggtttagaggggcgtccccactcccttatctggcggagaggaagctgggggtaccctctaaccgagattcggctcctggggctacagtccatcgccctggggtgtgatggttatggaagtcagaagtgtcgctatttgccccgttttcccatgagaattagacatgtcagcatcaccccctccccttgctcctgagcatacctctgtgtcccctcccactaagccccagcccaggggtctccagccttggggagacagggccagattccctaggtcagtggatcagggctgggccagagggaggcgaggctgaaggagcaagggaggggctcagagggcttcccggaggaggcaaactgcgcgcaagttgtctcctttctaacctgggtgtcaaaagagaagatgccaggactcagctgccgggtcctgcggctctcaccttcctccctctccgttccctggttggactccagccccatcgccctccctcctcctgcaacaagctctttctctcaggatcctcgctgatccttgtagcctggacacccctttctcctctctcccgcgtggtcggctcacacgtcgcctcctccgccaagctctccgctctcctcgacacccctggggaatagtcccctccatcccatccccctatatatttccttttggccccaagcgccagcagagatcccccgcccgtgggcaccagggaggtgtcctgggacccccgcgatgggatagacggtgggggccgcgatgcacctgccccgcccgacccgcacgcctcgggtgccgcagcgcagctaccccgcccgctctccgcatctcccaccccccgcttcccaggctgcctcgctcgggtgacgtcagcgccccggtccccgccgcagccgctgcatcctccgtgcccggcctgagctggagtcccccgcgccccccgcgttccgcccggccatggctgcggtggcgctgatgccaccgccgctgctgctgctgctgctgttggcgtcgccgcccgccgcctccgcgccgtccgcccgcgatcccttcgccccccagctcggggacacgcagaactgccagctgcggtgccgcgaccgcgacctcggcccgcagccctcgcaggtgaggcgcgtgcggtgccaggtgccagcgggggacgcgggatctctccgaaggaggaggcgttgggatgggcttctcttggatgacagcaggagactttggtgggggtgtccgtggggaggtgggggtcgggaatggggagatctctccagtagttgacgggctggggttccctctgatgggggagtgcttggggatgcaggtccttgcgataaggggccgataccacctcccgggctccttccgcactctgctgggtaaggaccctctagcacccaacccccagctccctcaggcctgatggtccccccacctcattcctcctcctccacatcgtgttccctccccactcagagctaccagcccctactcataccaccactccccaggattcaagcctgatctgcgtgtgaccaaaaccccctcctctgagcctccccctcctcctccaggtctgagaatccttctccatgtctcccctcctccctggaacctagtggggggaaggctcatttctctccaccttcactgtccatttctcttctcaagctccctccccatctccctcctcagagctaagagcccccactaatatttgtagcctctcccaacttcatctccatctggctagatgtcgtggggagcggggaagcctttccctgcctctgctgaatgctccggtccccccaccctcctcctgcccctccccatggcctgagccccctgtcctcccctcccccaggcggggctggagggcgcctccgagtctccctatgacagagccgttctgatcagcgcttgcgagcgtggctgccgcctcttctccatctgccgatttgtggccagaagctccaagcccaatgccacccaaactgagtgtgaagcaggtgagggcccgccggcagggtgggccagcgtggggagaggtggcctgggaagggccgtccccagtcacccgctcccacctcccacagcctgcgtggaagcctatgtgaaggaggcagagcagcaggcctgtagccacggctgctggagccagcccgcggagcctgagccggagcagaaggtgggcctcccactgcggcctggggtcccttttcccaatacccccaccctcttcaccccgtgggaaatcttcattcacgtgcagaggctctgccagactctgcgttctataccaggcctgcagggcaacctccatccagccccgtcatgtctccagccttagttacatgcaacaacgccccccatgccccaccaccttttcaggaataagtggcagaaaacagccatcatttatcaaacatctgtcctggttcgggcctgacttcaacctgtcccaaatgtttttgtgtcacttggaggcacaaaggacaatgtcacccccatttagtgcccagggggcaacctcccaggtcatacacagggctgtgcaaggggcgagatttgaagccaccagagctgtggccactcctcacctcactcctcttaggcgcccccagagctgccaggtgctggtctaagcccttcccctgtgatgagctggtggtcactgtcacctggaggggctcagaactgcggctcagggtagagcaggcttgcctcgcaagcacgcacacactgccttatgggagaaataataacggttcatctattgtagtccaagcaatgctgcatcatggggaaactgaggcacagaaaatcatgtagcatagccagagacctaggggctgggactccccagaaagccctttccccacttcccccattttcctccaccccttcccagctttcactgctgttcagaaaagctcactgcactgtcagcccttccaattcagagctccctcttatttatttatttattttttgagatgaagtcttgctctgttgcctagcctggagtgcagtggtacaatcttggctcactgcagcctccgcctcccgggttcaagtggttctcctgcctcagcctcctttgtaggtgagattacaggcaccccccactacaatcggctaatttttgtatttttaggagagacagggtttcatcatgttggccaggctgatcttgaactcctgacctcaagtgatcttcccacgtcggcctcccaaagtgctgggattacaggcatgagccaccatggccggccatcagacctccgtcttgacgctgtcaaaataagaataatgaggatgatgatatttttagtaatagggactactacgcattaagtgcctgtgccgtgccaggcacctggcaggcatcctctagttgaaatttcatggctactccatgaaggaagagaacgatacccattttagggctcagagagcacaatccacttccctaagggtacacaggaagccaactgccacgctgagatctgtgttcactataagaagtcctattggcccaaatcacttagccacatccaatccaagtgaattctcctagctcctctcctgttagtttatttattcatttatttatttgagatggagtctcactctttcacccaggctagagttcagtggtgtgatcttggctcactgcaacctctgcctcctgggttcaagcaaatctcctgcctcagcctctggagtagctgagattccaggcgtgcgccatcatgcctggctaatttttgtatttttagtagagacagggtttcacgatgttgtccaggctggtctcaaacttctggcctcaagtgatcggcctgcctcagccttccaaagtgttgggattacaggcgtgagccaccacatcctgccccctcccattcattggttaatgccctatttcggtgccatctttgtgtcttggaccttttttcaccagagaaaggtcctggaggctccaagtggggccctctccctcttggacttgttttccaccctctgcaatgaccttgtcaactcagcccagggatttgtctcctccacctggacatactacttgcagactgacaatgggaaagtggtggtgtttcaggtgagacctctgacaggggccacgccagagtggcagatgggtgggcagggtaagaagatgggatgcattggctcttagctcatgagatgcaaagtccacagtgggcgagcttcaggcacagctggatccaggggctcagtgtctcactccatgccttgactctgctttcttttgtggtggcttcattcccaggcatttacttcttcttggcagtaaggtggatgccagaggctctaggttacaaacgctgtggtttttttttgttgttgttgttgttgttttgagatggactcccattcttgttgcccaagatggagtgcaatggcatgatcttagctcactgcaacctccacctcccaggttcaagtgattctcctgcttcagcctcctgagtagctgggattacaggcggccaccaccacacccacctaatttttgtatttttagtggagacggggtttcgccatgttggccaggctggtctcgaactcctgacctcaggtgtttcacctgcctcggcctcccaaagtgctgggattacaggcatgagccactgccccggctccctctggggttttaactgagctgggatttactctgattggccctggctggatcatatgaccatctctcaggcaattcactggcttggtctggatcatgttcctacttctggagctaaaggatggggttaaggcaaatggaggagcccatgaaagcagaaaacaacatccctgacatcaagcccacccctgatacccaggggaactgggtatcagctgggcgtgggacatggcagtcacagagggcctgcctgggcccaggggtgctgttctcacaagcctctctgtgctgtcttgttcctggcccagactcagcccatagtggagagcctcggcttccaggggggccgtctgcagcgcgtggaggtgacctggcgaggctcccaccctgaagccctggaggtgcacgtgggtaaggtgcaacctagaccagtgttccttccatgggtggccccactgccacaaggagtcggcctggcaaacagaccttctaggatcgggatctccatctctcaagtcctgggttccatggctcatcccccaggtctccatggtctatttcccagggttccatggtccacctcccagggttccatggtccacttctcagggttccgtggtctacttcccagggttccgtggtccatctccccgggttccatggtctatttaccagggatccgtggtccacctctcagggttccgtggcccacctcccgggttccgtggccacctcccagggttccgtgttccgcctcccagcgttctgtggtccacctcccagggatccatggttcactttccagggttctgtggcccatctccctgggttctgtggcccatctcccagggttccatggttcatctctcagagttccatgggttcatctcctagggtcatctcctagggtccatctccaagggttctttggtccatctctcagggttccatggttcatctcttaggattctgcagttcatctcccagggttctgtggcccatcccccagggttctgcagtccatctcccagggttccatggtccatttcccagggttccatgttccatctcccagggttccatgttccatctcccagggttccatgggttcatctcctaagggtcatctcctaggatccatctcccagggttccatgggttcatcttctagggtcatctcctagggtccatctcctagagttctttggtctatctctcagggttccatggttcatctcctaggattctgcagttcacccccagggttgcatggttcatctcctaggatccatctcccagggttccatggtccctgtctcagcattctgtggtccatctcccagggctctgatctccattccaggactctatgccccaggtcctgacctcctccctcctggtcatggttattgtggcctcttagcaaagacctggtggtcgctgagtggcagctgatctctcagaccctgtaggccccctggacaaggtgaggaaggccaagatccgagtcaagaccagcagcaaggccaaggtggagtctgaagagccacaggacaatgacttcctcagttgcatgtcccggtgggtggcaggaccttgggggtgggaggggggtgggactggaggtacgggtctccctggtcccggcctgggcagctgagtggtgcctgccgggcggggcaggcgctcgggtctgcctcgctggatcctggcctgctgcctcttcctctccgtgctggtgatgctgtggctgagctgctccaccctggtgaccgcgcctggccagcacctcaagttccaggtgggtgggatctgtgaatggcgctgggccgagggagggggtgaaggcagagagagctgtttgctggtcctggatttggccacctgctcccatggaggccaggacctcagacatttttttcttttttcatgtatatacatatatatacatatacgtgtgtgtgtgtgtgtgtgtgtgtgtgtatatatatatatataatatatatatatatattttttttgagatggagtcttgctctgtcacctgggctggagtgcaatggcaccatctcggctcactgcaacctccacctcctgggttcaagcaattctcctgcctcagcctccgaagtagctgggactatgggcgcgggccaccacacccagctaatttttgtatttttagtagagacggtgtttcaccatgttggccaggctggtcttgaactcctgacctcaggtgatccatccgcctctgcctcccaaagtgctgggattacaggcgtgacccaccgcgcccggcctatatatatatttttgagacaggatc

SEQ ID NO: 58 - DNA, 1073 bp, Homo sapiens
  Genbank Accession No. AF182032
gcacgaggcctcgtgccggcggcccaggcacggagaggcggcgagaccgcagaattcccgtactgattagtcaacagtggaaaatctgaagagatgcaagcaggaaaaagaaattaaaccaggcctgaggagcgatgcgacaggcatgatggaggtcgagtcctcctactcggacttcatctcctgtgaccggacaggccgtcggaatgcggtccctgacatccagggagactcagaggctgtgagcgtgaggaagctggctggagacatgggcgagctggcactcgagggggcagaaggacaggtggagggaagcgccccagacaaggaagctggcaaccagccccagagcagcgatgggaccacctcgtcttgaatctgaccttgtccaagaaggctggacgagagaccttctgtcccctcccagagggggaaccctggcactggcccagcagcctcttctctgagctccatgtcccagataaaccaggccagactgagaaggctccccagaggcctctgtggcctccactccgggaaagccctctgcccacacccacaggcttcacattcccaccaccttcgcaccgtgcccaggtacactttcaagacactgtaaccacaagatgttatttattgagctggcgccgggacttgggcggggcctgccctacagtgagcagcccacacaggaacgctcctctcgcgagcggcccgggcagggaccctgtcccaacaccaacacctcctctccagcccaatcttctgggtccagacctgcttgtcccttttttagaaaacacttttaaactttttaaaaattttaaaccttttttcagcagatatggagagagctgacaatcaattcacattttttaagccattttagctaaactgtcattgtgcatctctgaggttccctcatggagctccacagatccatttttagggaagggattttggctcaaaacgatctgaccacctctgccctgtccaccaggataagtgacacctaggacccaggaaataaatgccgatgatttgtgtaaaaaaaaaaaaaaaaaaaaaaaaaa

SEQ ID NO: 59 - DNA, 923 bp, Homo sapiens
  Genbank Accession No. AB019517
aggcatgatggaggtcgagtcctcctactcggacttcatctcctgtgaccggacaggccgtcggaatgcggtccctgacatccagggagactcagaggctgtgagcgtgaggaagctggctggagacatgggcgagctggcactcgagggggcagaaggacaggtggagggaagcgccccagacaaggaagctggcaaccagccccagagcagcgatgggaccacctcgtcttgaatctgaccttgtccaagaaggctggacgagagaccttctgtcccctcccagaggggaaaccctggcactggcccagcagcctcttctctgagctccatgtcccagataaaccaggccagactgagaaggctccccagaggcctctgtggcctccactccgggaaagccctctgcccacacccacaggcttcacattcccaccaccttcgcaccgtgcccaggtacactttcaagacactgtaaccacaagatgttatttattgagctggcgccgggacttgggcggggcctgccctacagtgagcagcccacacaggaacgctcctctcgcgagcggcccgggcagggaccctgtcccaacaccaacacctcctctccagcccaatcttctgggtccagacctgcttgtcccttttttagaaaacacttttaaactttttaaaaattttaaaccttttttcagcagatatggagagagctgacaatcaattcacattttttaagccattttagctaaactgtcattgtgcatctctgaggttccctcatggagctccacagatccatttttagggaagggattttggctcaaaacgatctgaccacctctgccctgtccaccaggataagtgacacctaggacccaggaaataaatgccgatgatttgtgtgaaaaaaaaaaaaaaaa

SEQ ID NO: 60 - DNA, 36741 bp, Homo sapiens
  Genbank Accession No. M13792
gatctgggtaaagggttttccaggtgtcaggatggaagtgactaaggtgcagaggctggagggctggggcaggtagaagcaagcattcctgttacctactgctgtgtgacaatctccccctaaaacacaatggcttaaaataacatccatttcattacatatctcaatactataggtcaggaatttgggctgggcttacttgggtaattcttctgtcccacatggcattgaccaaagcctggttttcagtgggcagctgggctggatggcccaacacagcttcgctaacatgattgctgtcttcgtagggatggtggaagcctgggctcagtgggactgtcaactggaatggccatatgtggactctcttagcatgatggtctcttctagaagcttgggttcccagagagaatgttcaagaggccccaaaggacaccacaaagcttctttatgaccaaggctcggaaatccaggaagcttgctcccatcacgctctattactccaacaagtcactcaggccagcccaggtccaagaggaggaaacctagactccatcttgcaatgtgaagaattgcaaataatttgtgtcacccttaagcaaccagcaactcatctaggttgattggcatttcagcaatgtggtgggaagtggtgggactgatgttgaagagggacttgaatgtcatgagaggctggggaggcaataaggtggggagtgaagtttctcgagtcagattcaaatttaaaccccagttttgccacttacaacccatgagccaagcaggctgtctctctatctgaacctcagtgtcctcatctgtaaaatgaggagaacacctcctacatctgaggatgactgtaaagatgaaatgggatgggtgcttataaagtgcttcccagtgtacctggctccaaacctgtctcagtaaatggcagcccctattattgaacccgagtaacacagagagccaagaaaggatcttacaaaaaactcccctggctttgacaatgtatgagacccactgatagggtttggctttgtgtcctcacccaaatctcatctagtagctcccataattcctacatgttgtgggagagactcggcgggagataattgaatcatgggggatggtctttcccatgctgttcttgtgatagtaaataagtctcacaagatctgatggttttaaaaatgggagtttccctgcaggcgctctctctttgtctactgccatccatgtaagacgtgacttgctcctcctttgccttctgccatgattgcaaggcctccccaccattgtggaactgtaagtctattaaagcctctttcttttgtaaattacccagtctcaggtatgtcttttttttttttttcatgagatggagtttcgctcttgttgcccaggctggaatgcaatggtgtaatcttggctcaccacaacctccacctcccaggttcaagcgattctcctgcctcagcctcccgagtagctgggattacagtcatacaccaccacgcctggctaattttgtatttttttttttttttttagtagagacggggtttcaccatgttggtcaggctggtctcaaactcccgacctcaggtgatcctcctgccttggcctcccaaagtcctgggattacaggcatgaaccactgcgcccaggctcgggtatgtcttcatcagtagcatgaaaataatggactaatacagccaccctctccctcactcccacatacaaccaaaccccaaatccagctgattttacaccctaaatgcagcttgaatatgagtttctccacttcccccactgacatcactatgccctacccagaccatggcagttgcctccttcctggtatcctgtcctccctcacccccgctggccccctgtaatgccctcccctcacagcagggagcccaggcttctcaaagtgccctgtgggtgcgaaccacctgggggtcctgtttgtataaaatacagattctacttcagtaggtctgggatggggtctgaaagtctgcatttgtagtcagctcccaggtgatgtgggtgctgatgatccctggatcacactttcagtagctggagaatattttttccaaataaaagggtgattttgtctcgcctccacttaaaacactccactgacttcctaggaatcccacaccatcgctgggtcccacatccctggcaggattcagctcccatcagaccttctagccccttgctctccactctcccactctctctttcccccttgtttatgggtttgttaatttatttatgatgaaatgaaatgaagctaccatccaccccagtactggaacattatcaataacctgtgtgtggccaggcgtggtggctcatgcctgtaatcacgccttgggaagccgaggtgggtggatcatgtgaggtcaggtgttcgagaccagcctggccaacatggtgaaaccccgtctctactacaaatccaaaacttagcagggcacggtgccacgcgcctgtaatcccagctactcgggacgctgaggccgagaactgcttaaaatccaggaggtggaggttgcagtgagccgagatttcgccactgcactccagcctgggcgacagagcaagagtccatctcaaaaaaacaaaaacaaaaacaaaaaaacaaaaaacaaaaattagccaggcgtggttgtgggcgcctataatcccagctactcgggaggctgagacaggaaaatcgcttgaaacgctgggggtgcgggggggcggtggggaggaggcgggccagaggggcagaggttgcagtgagcccagatcgcgccacttcactgcagcctccgcgaaagagcgaaactccgtctcagtaaataaataaataaataaataaataaataaataaataacctgtacccgcgtgttatttccctccgtccttacctcctcccggctccttccctttcacctgagataaccactcttctcgtatctatgctcatctttcccttgctttacattttttccaccgatgcatgtgtctaaacatacatacttttggttttgcttttacacattctaaaagttgcaccattgtatgcagttttccgcaacttagtttttttcactcaacattgtttctgagacattgtttctgttgttgtctggctgaagttcattccgtttcactgctgtctaacgtttcatggtgtgaatattccggtttatttgcccactcgcccgtggaggggcatttgagggtgtttccaatgttcctgttattcggaatagcgctggtgtgaacattctgcacaggtctctggctgcgcctgggcgggtttcttaaaggtgaatgcccaggaggggactgtctgtgttctccctccctccgagctccagccttcctcgcctcctttcactcccagctccctggagtctctcacgtagaatgtcctctccacccccacccacccctgatgaactcctgcaggttctgcaggccacggctggcccccctcgaaagttccttaactatacaattatggtgtgtgtttctgcgacgagcgtccgtctatccggtggaaggcacgccgctcgaggcttgcgatgctcccggggtccccgcttctagcttgggcctggcgcacagcagcgcccagactgcagggggacgcttgaaagttgctggaggagccggggggaaggcagcgcccagcgaggcggctggagcgcgcgcccacaggtgggtccggtcgggcgccgcggggccgtagttttcgggtcggcgggcgaggacgccgggtccagaattccaggaaatgcgcgatccaggccggcgggcggggcgggggctccggcgagagggcgggccccgggaacggcggcgggcggggcgggaggcggggcccggcccgttaagaagagcgtggccggccgcggccaccgctggccccagggaaagccgagcggccaccgagccggcagagacccaccgagcggcggcggagggagcagcgccggggcgcacgagggcaccatggcccagacgcccgccttcgacaagcccaaagtgagcgcgcgcgggggctccggggacgggggtccggcgcctgggcggcccgaggggcttagcggggcccagcccggggcgtccaaaccctgggaacgaacgggggctcctgcaggcgagttcttccttcggcttaggccgtggcttgcttgcgggctaatcagggacaatggggcagagaaggtccagaacccggaggcctccagagtctgcttctgcccctgacttgacccctctgggtctcagtttcgctgtctgtcaagtgggcatcctagcaccgctgagcgctgtgtgggcctgggcagggacttgaggtctctgaagctcagctgtatgatcaggcccgatgtctacgccggatagcgacctagtgctgtgccccgcgcctactgagtgctcagtgaatggaagcagctttgtacgccagcgttatggtggtgagcgccaaggagctcaggtttgtggatgcgccccggggaagaaccgtgagccctgccagaaaggggagggaggggagcagagcaccccccttcccccgcgcgggaagaacaggagctaggtaggccctgggtttggggccctagcagggttcactcgaggccaagccatggcccactggccccaggggagaatccccttgtttctccgcccaccagctgtggcgtcttgggactgttggggtcagggagggtctggacccccttggcctgtctcagagtccgagaggaggggcccaggagtctgccaagcagggtgagtcagccagtagggtgtgagagtggttggggaaggagtcagctgcagtcagcctcaacttacccttctaagaaataggtgtgagtggcccaggaggttggctcacgcctgtaatcccagcactttgtgaggctgaggcgggaggatcatttgagtccaggagtttgagactagcctggacaacaaaactagaccccgtctctccaaaaaataaaaaaagttaggggaagtgtgtgtggtggtgcactcccgtagtcccagctactcaggaggctgaggcgggaggatcgcttgagcccaggaggttgaggctgcagtgaggtgtgatggtgccactgaccttcagcctgggagacagagcgagaccctgtctcaaaaaaaaagagaagaaaaagaaaagaaaagaaataggtgtgaatgatgatgacagctatcacaaaagtgccggtgagaatccagtgagtgtgcatgtgtcagtgagggagacaggctgtggagagcccacctaccttctgaggagggtgaggcctggcccccactactgatgcccccagcccagggaaaatgctcagctactccccgtcagaagctggaacgactgaggtgctgtacaagccctcctacccccacccctgcctccttcacgtcttactggagctggggcccatgattggcgcctcccctttgcagtctttttattaaatgctctgggctccctctgcccttgggctggggacccactgtaccctgatgtgaatcctatggcagtagcaaagctctttgattggcggggtgcagtggctcacgcctgtaatcccagcactttgggaggcaaaggtgggtggatcatgaggccaggagttcgagaccagcctggccaacatggcaaaaccccatttctactaaaaatacaaaaaattagctgggcatggtgcgggcgcctgtagtcccacgtacgcagaaggctgaggcaggagaatggcataaacccgggaggtggagcttgcagtgagccgagatctcgccattgcactccagcctgggtgacagagtgagactctgtctcaaaaaaaaaaaaaaaaaaaaaaaggctccttgattgcgaacatgttgggagttatggagagaacagcagggcccacttctagagcacttgttgcagacacccattggatccttgcagttcttctgtaacagcccatcaagggaggggctcatattattatccccattttttggccttgctcagtcctcccatctgattcaagctggcagatcattttccctattgggacctcagtgtccacacctggaggatggaacatcagctgcttatgtgggtgtcccgtgtcctgagtcccaaggccacaaggtgatgcttgagagtgaaggtagaatgttacctgccatgtgtttgaggcgtgacaaatcttgtatgattgtgaggaggaacttgtgtgagctggcaggagaagtgggaaggagtgtgaatctcagagccactgtgaccagagccagctccctgccctcttgtgggagggacagatgacagttataattattagcattactagctgcagctaatggagtgttgatgtttctgccaggcaccgttctaaacacattatctgcattttttatttaatccaggcacagagaggttaactaggcccaagatcacacagctaggaaatgtccaactctggggtttgagtccaagggaggctggcttcgaaatcccatgcctctaaccatctttcctaaactacctctgcagaagcctttggggatagaggtgccagtgccccaggtgcaaacctcctgagacaggagcctttgctgtgtccttcagcttctcatacctgccaccagctgaggcctgggacctggtcagctagaagaaagcagagcagggcagcgcttttcaaactgcactcaagtggcctgacttttaatgttcacactgtgattctgtgtgggtcgggttggggcctgcgatgctgcactgctgaccagctcccaggaaatgctaatgtcaacgatccaggaacacactttgcttagcaaggccctaggcagctgccttctgttgtgcgggacccctattgactccaatggatatagcaccaggttcaagaggctaccttctttggaagaggtagcaaacaagatacggggttttactgggggcttagacacagggaagagagtccagtggcggcagactgagcagaagaaccgcaaccacttgcaaatcatgcagtttatgtagcattttcatttaacaccttctcccaaccatctccacctagtaaccttcatttaacccaaaacaaagggcctcggtccctatacccctgtatggtcagtgtcccgtgggaatggggtggggctcagatgttcctcatagataacgactggatctccaggttggccactcttggattccttcgctcagaactctgaacacccattcaagtgtgcctgccatgcagggtcatcgtcaggggatgcccaagtcaagtttgcctgtcgggtgtgcctcccatacccccacctggtttgacttagcacctgctgggcactggaagaagtgcaaaggggggttgcaggggtggcccttatcagcctatgttcacaggtggcaccaggcactcaggcattctgcatcctggaggccagtgctgatcacatgcctgttacaataatcataacaatagctgtccttgaagtagtcctgggtaccaggtgccttcagtgactttttcttctttgccagaatctcactctgtcgcccaagctggagtgcagtggcaagattttgggtccctgcaacctctgcctcctgggttcatgcgatcctcctgcctcagcctcccaagtagctgggactacaggcgtgtgccgcagtctcactctgttgcccaggctggagtgcagtggtgtgatcctggctcactacaacctccacctcccgagttcaagccattcttctgcctcagcctccggagtagctgggattacaggcgtccaccaccacgcccggctaatttttgtatttttagtagagacagggtttcaccacgttagccagctggtctcgaactcctgatctcaggtgatcctcccaccttggcttcccaaagcgctgggattacaggtgtgagccactgtgcccggctagtaacttttatctcacggaatcctctggacgacttgacaaggcatgggtcttcatccccatttacagatgaagaaactgaagcttagggagtggagggacttgccagggctacacaaaatctgagagccttgaagctgtagactggcaagtgaacaggtacaggctgggacagcagtttctttctttttttctttttttagacagagtttcgctcttgttgcccaggctggagtgcaatggcacgacctcggctcactgcaaccttcgcctcccaggttcaagtgattcttctgcctcagcctcccaagtagctggaattacaggcatgcaccaccatgcccggctaattttttgtatttttagtagagacggggtttctccttgttggccaggctggtctcgaactcccgacttcaggtgatccgcccacctcagcctcccaaagtgccgggattacaggcatgagccaccgcacccggccaagggacagcagtttctaaactgtccctctctgatgcagaggggaattggggctaaatcagcaatgtgccttttctgtctcatatttgaatgtctactctgcacgaggcgctgtcctgctttgcatacagtgactcatttaatgtttatgtcagccctctgaggaaggtcctgtcctattattaacttcacttattatgaggaaactgagactcagagaggggagggaacttgccaaagtcacacagctggcaagcagcagagctagacttgaacccagatctgcctgcactcaagtagaagctgttcattgctttgctcatttgccaattccactttatgcaaaaaagagggggcagtgtggggggaagagttagaatcagggtggcagggtgggccagtgcattagccctgggcttcagatgtactggggttgaattcctgcctgccgcttagcagctagggtacctcaggtagacaactcctgaaactcagcttccccctctgtaaaatggggtgacaaaaccaagatcttggggttcttggggaaactgacatgctgattggtttttgtacagtgcctggctggtaacagcaggccctcaggggtgcgtttccttcctggggactggagtgggggttgcagtagactctgggaggcctctccagctgcagaatctccctcctccctcctcctttttgtcttcctgacacaaaacccaccagctgcacttctttgggcttgcagtggctttcagttaccagagccacctgttaaaacaaaaatgtgcctaggaagagcctgccttacccattttgactcacatggcagttggtggtggaggggaacaaaggagactgagtttcatcgaagccttttgcttcggaggaggaagggaggatcagagagaggaagtggtctgtgttcacacagggaggcaggggaggccaggcagcttcccaatcctgcattcaacctcagggtgggcttgacctgggtggctgggggccctgtgatccaggagagacttgtccacctgctcaggtgtcttgaaggggtccctgtggtaccccctgggcggggcaaggtagtaggaccatggtctggctggggaggtggagaggagcaggctgtgggcgcagagtgaggttggaatctgtatttacccaaggtgttgggggtaggcttgccctcagcccttaatgttctcaggcccctgagcagttgtgggggataacctctgcactcctagtgaccagggagctagaacagcaaggaatttgaacttggacaccagctggggtcaggctctctgggtctgagtcctgatttcccactttccagctagaggagcttgaatgagtcatttaacttcacggtgcctcagtttcccctctctaaaatgagaattatacccatacccacctctcaaacaccaagtgcaggcctggctcagagcaggtgctgcagcaatagctgccattggtcagcatcatcatcatggttggtaatggtcctactttgacttttgagacagagtctcactctgtcgcccaggctggagtgcagtggtgcaatctcggctcactacaacctctgctcccgggttcaagtgattcttctgcctcagtctcccaagtagttgggattacaggtgtgcgccaccatgcctggctaatttttgtgtttttagtagagacagggtttcaccatgttggccataacaatggctgtccttgaagtagtcctgggtaccaggtgccttcagtgactttttttttttttttttttttgagctggagtcttcctctgtcacccaagctggagtgcagtggcacgattttggctcactgcaacctctgcctcctgggttcatgcgatcctcctgcctcagcctcccaagtagctgggacttgggatacacttgcccccgctggtcctcccttccacctctgtgaagaggaggtctcaaactcctggcctcaagtgatccacccacctcagcctcccaaagtgctgggatttcaagagtgagccaccgcacctggcccctgtttagatgttagcatcagtgacccagcaccttgctatgtggcatgcagggagcgtgctgctagacctccgggtttagagtcaaatagcttcctggctgtggtgtgcattagactttctaactcaaggtcctcccactctctgagcctcagtcttgttgcctttaaaacgagtttaagtgtgctgagtccctatgctgtggctccacaggaatttccccaggtggaagacacatcttgccttctgtgaaacctctcagcagcagagctgtcaggccccgtcagcaggagacactgtggggactgctcagtcccttccactgtgtacctcggagctggcggagcctagatgaggctgagcatagagggcttcctggaggaagtggagctgaaacagtttctcagcccagggctgctctgtctcctggcctcacactaaaagtcagttgagaggccatagtggcataagtcactgaccctggcactgcccagctcatcaccaaaagcagggctagggagggaggggacattcgattggcagtgggcacctgtggctcatctgggttctggccacggtgctcaggttctgtgagctgaccaggcagccctggctcctctgcccccgtgtgggttctgccaggtcccatggggcaggtcagccccttccttgttgcagggagagcacccagcattgctgacatgggacagggaaacgaggaaataacggtgtggtcattgaacacagagagcactaggtgctgtgcgaggtgctgaggacacgacatgatgacacagacaaggtcccccctctcagcaaacggctcatgagggagacagacatgttacatacatgaacccaaaaagtcagacgaaaacaaaacagagcgatgtgtttgggaggcaaacccaactgccggagggcgagcagttgggaacgtggaaacatgagtcagatctgggagtatctgtcccaggagtccaagacctgggtcctcatggtagctctgccaccgacacactgagtgaccttgggtaagtgaacccaccgccctggacctctctggcacgcatctcttgagagcagggacttagtgcatttcccgagggcctccacggtgcctggcacatagtggggcttagtaaatatttgttggtaactgaggatgcttcctgttcacatcagcgctgggaggatttcctgctgttcagacaaatgctgggctggctgtgagtcagccttgcagagagcaaaggcagtgggaaggggcgtgagattcccctctggagaggtcaggaggccaggcactgtctcgacatgagtgccagggagggggtgtggcctgtgggcagggcttgggctgaggcagagggacttgagttccaccctagctctaccaccatcaattttgtgtaactctggacaggccactgaacttctccgggcttagcctggcaagtccatttccccatctgtaacatgggccgatatgtacattgcctagggattaaatgagataaagggtctgaaaacagtaggtagctgctttatcattattattatttctgtattattgatgtctgaggctaggcccacagaggcagtacagtagagtggttaggagctcaagaatcagactagggttcaaattctgactccatcactgactgttttggggtacttctttgaacctcagtttcttcatcagtaaaatgggagtgaagtctctaccttgctggttgtaaggatgaaataagataatgcatatagatggtctagcacatagtagatactcaaaagtttgaggccactgctgacccttttccctgaaaggagacaggagagcggggtcgccaccccattgtcattgtcatctggaataggctgacagacttcccatggtgtgttgcagttttctagaaaattcagtaggaggcctgcctgagcttgagccacctgtggaggtgcttcctgcctctgctccacacctgaaacgcgtctgggcctcttctcaggcagccgtgagaagggatgagtgctactggtcatggtgggcagctggctctgctttcccccttcccagaggcgctcctgcctcctgcccagctccctgaacccctagcttctgcaccccggcactgtctggcttctgccccgctgagcacccactgtctctgacgctgccttgagtacttcccgcatgttattcaaatcccaatcagatcttccctcccccagtagctggtcttctgttctggcttcctgccatcctgtcctccacacagcagccgggaaaggtttttttaaaggggactctccgatttaacacacttgggtggaaaaccctttgcttcggcctctgcaatctccctgccccctctccactttgccctggcctcatttctcaccactaacctcactctgcactctggccaactccccgcctgcttcctgattcagacactaagcacacgcagctcccctgcctggagccattctccctctccttctttcttctccctggagaactccccctttaagtgatcttttcccaacacactttctaaattgcccccaccccagtgtgatttttctttatctcatagcacttggtctgcttcttatcacagtttgcaaggctgagttcagaaaggtgtgtttgctcattctgaggcaggagaggctaccttgtgctgctgtggtaacaaacagcccccaggtctgaggggtctgcagagacccaggttgacctcatactgcttgtccctccagggcctccagtgaggtttcggctccttggatcactcagggccccaggcagatgggaagattccactctgaacattgccaattgttgtgccagagtaaagcagagctgggaggtgggctcttgaattggcatttaaatacttttgccaggcagggtaaggcagctcacgcctgtaatcataacactttgggaggcctaggtgggtggatcacctgaggtcaggagttcaaaaccagcctggccaacatggtgaaaccctgtctctactaaaagtacaaaaattagccgggcatggtggtgggcgcctgtaatcccagctacttgggaggctgaggcacgagaatcccttgaacctgggaggcagaggctgcaatgagctgagatcttgccactgcactccagcctgggcaacagagccagactccatctcaaaaaaaaaaaaacaacaacaacaaataaataaatgaataaatactttagccagaagtagccatgcagacctccccccaccagtcccacccacaagcggacgtgactaccgcccccattcactgcctgatcctcctgttctcaggggctccaaggccaggcctggtttgaccttctgactttctgacttcctcctaccttcccagtaacctcatgcaactcctttcactcagcctcaatcatccccatgggtgtttaaacttgcccaagacatgcccctttgaaaaagcctgccattctcttgacccacatgcacgtcctgccccctccaaggctgctagttcctttaggggcaaaattgtgaaagagtagtctaaaccttcttcctcttcttacctccacttctttcttaccttattcccatgtggattctaccctcactcaggcctctagaacggttcctctacggcagtggttcccaatcttgactacgtgtttttttaaaaaaagtcctccacctgggcctgccaccaaggatttttctttaattgacctcagatggggttgaggccttgggaactggccagaacttcccgtgctcctaacttgcagccggggttaagaactactcctctgaagcccccagtgcctgcgcttttagcccgacggacaagtttctgcccttccatcctgtgacctccagcagggcctgaccatgtgagttttctgtggctgccgtgacaagttgccacaccctgcatggcttcaaccaacagaaacgtgtgccctggcagttctgggggccagaagtccaacatcaagatatcatcagagccacatgcccactgaaggctctcgggggaatccattccttgcctcttctggttgctggtggctctaggcattccttggcttgtggctgcatcattccagtctctgcctctgaggtcacgttgctgcttcctcttgtgtgtgtttctcttaaaactctctgcttctgtcttataaggatacatgtgattgcatctagggcccaaccagataatccaggataaactcttcctgtcaagacatttaataatcacactttgccatataaggtaatttttttttttttttgaggtggagttttgcactttcacccaggctggagtaaagtgatttaatctcggctcactggaatctctgcccccaggttcaagcaattctcctgcctcagcctcctgagtagctgggattataggtacctgccaccatgcccagctaacttttgtatttttagtagacatggggtttcaccatgttggccaggctggtctcgaactcctgacctcaggtgatccacccgccataagttaatattttttttttgagagggagtattgctctgttgcccaggctggagtgctagtggctcaatctcggctcactgcaacctccgcctcccaggttcaaatgattctcctacctcagtctcctgagtagctgggactacagatgcatgccaccatgcctggctgatttttgtatttttaatagagaggggatttcaccatgttggccaggctggtgttgaactcctaacctcaagtgatccacccacctcagcctcccaaagtgttgggattacaggcatgaaccaccacgcccgacccatataaggtaatatttacaggttctggggattaggattagcatgtagacagctttgtgggggccaccattcagcccactatgctaaccctgtgaaccgttgctcgcttctccttgacatctgacggcctggccttctgcataccacacaccctcccacctctctggccacagttctgtaggctcagcctcctccgtaaggccattaagtgcttgtgctggtcaaagtttcatcctaggccttttccttacctcccttgatattttctccctaggtgagctccttcaagcccacagcttctgtgcttacccacactcctacctacattcccagcttgggcttctcaggccagctctagactcttgtatcccactgggttcttccacttacctttggatatctcaaaggcatctccagttggctgggcacgatggttcacacctgtaaccccagcactttgggaggccgaggtgggcagatcacttgaggtcaggagttcaagaccagcctggccaatatggtgaaaccccatctctactaaaaatacaaaaattagctgggcatggtggtgggtgcctgtagtcccaactactcgggaggctgaggcaggagaatcgcttgaacccgggaggtggaggtttccgtgagctgagctggagccactgcactccagcctgggcaacagagtgaaactccgtcttaaaaaaacaaaaaacaaaaggtgtctctagtgtaacataactaaaaccaaaccaatcatgcctccctcccccgcatcctccctcctggagggagctccaggacttggtcttctcttccagagttctctgtctcaaactgcgggaattgctccccacccaggcctaacctgaagtgtgagccttggcatctctttctatccacctgtttttcctctatgcacctcacaaccctggtccaagccaccgtcatctttcaaatggctgcagtagcctctaactggccttggaggagccatcctctttctctaaccagctgccaaccctgcaatggcctctgtgtgctttccagataaagcctgactcctcgtggcccgcacagccctgcctgggtggtcctatcctgcagcctctccagtaccatgaaccctcccttctctgaacctctatttaatccatttcatataccccgttttctcctgccatagggccttgcacatgctgttccttctgcctggaattttcttcctgcctccctccgcacccctgccttgtgttgtgggttcctcgctatcctctagcttttcgctcaggctcattgttggccctctagatgtattcacttctcttgtttgttaccctctgtcataggactgtgttcgtacttcccaaggagtcgtcttggtttgtgactgtacattttcccatgtgacatttgcttaatgcctctcccactctggggcctgtacaagccccaggaacaggacttggaccctcctgtttaactctacaatctagcatccagcaggcgcgcaggccttcgttgacttttattttattcttattttttatttttgagatgcagtttcgctcttgtcgcccaggctggagtgcagtggcgtaatctcggctcactgcagcctctgcctcccaggttcaggtgattctcctgtctcagcctcccaagtagctgggattacaggtgtgcgccaccacgcctggctaattttttgcatttttagtagagatggggtttcaccatgttggccaggctggtctcaaactcctggcctcaggtgatccacccacctcggcctcccaaagtggctggattacaggggtgagcccccatgcccagccttcattgacttttagttgacaactatttagcatttgctatgtgccaagaactccctgcctactaatgcagttaaccctcatgaagcctagaaggaaggactgccattctccccacttaacagatgaggatgccgaggcacaggaagtgaagtgactttctcagggtcaagcagggagtgagtggaggagccgagattccagctctaaccgcatgatgctctatacagtgtgactccggctctctggctgggccctctccatagccctgtgagggttaaggatagaaaacagaggctcagagagttgaggtcccttgcctgaggtcacacagctggttggccgttccctgggctataagcttcagtattcccaatgctgagcatattttgagaacccgagaaacagacgtttggctgggtgggaactgaactcattttgtcagggaattcaacaactaagttggccctgagactgggtgtgaagaccgctctgtcccctgccagctggatgacctcaggagagatctgatgactctgaggtcctgctgataggacctctggtgtctctgttccctgctggcctcccctgggcctgggttgggtttcctctgcaggaggcagctcatgtatgtgctcctagacgcccttgggccagcagctccttggctgttcctccctgagccagggcagccaactttcttatccagctctccatgctccccaccccagcatgagatgtcagctgagagttttctggatctcccctagctagggggaaagcttccatcatttggaacaggaacagcaggaacagcaaagtccctttccccaccatctcccactgcctgctgtgcttctcctaacagctcatggtaaacaccctgactgagcggcaggggctgtttcctttgggctatccatgtccacctacactgccctttttaatccttacaatttttcttggacacgggggcataatattccattgtttttcagttgaggaaactgaggctcagagaggtcaagtgtcttgtctgaggtcacacagcagaactgggagtcaagccagatgggctgcctccaaggatcctactcttaaactctagagtactagaaagatcttccgttgcctaatattgattcctgataggctatgcttgagtagcatctgcttttgaaaatggagcctgggtcggttgcggtggcacatacctgtaatcccagcactttgggaggctgaggtgggtggacacctgaggtcaggagttcgagactagcctgagcaacatggtgaaaccctgtctctactaaaaatacaaaaattaactgggtgtggtggcacctgcctatagtcccagctactccggaggctgaggcacaagaattgcttgaacccaggaggtggaggttgcagtgagaggagatcacgtcactgcactccagcctgggagacagagcgagactccatccgtctcaaaaaaaagaaaacgaaaatggatcctgaattttgaaatatgctgtgactcttccctagtttgggacatctgggtcaatcccttttgttaaagtagtttatttagttggctgagagcgggagctgcctacgtgacctggagcacaagctttggaattgggcttgggttagaattccgcctctgccactcaccagctgcgattaagaacaaagatactgggttgggctcctgcctctattacttgcaatctgtgtggccttggatgagatatttaacacctccgaacctcagtgtcctcaattgtgaaagagatcgagataacagctgaacccacatcccaggagcggattaaatgagatagtgcagtacagagtttaccgaagtatatggggtcagcagccagccagtaaaatggtggctaatggttatcatgattaatgttaacattaagctctgaaaggtccttcgtgaactcataggtatttgttctctctctccctttctctctctcttccccctgcccccttgcaggtagaactgcatgtccacctagacggatccatcaagcctgaaaccatcttatactatggcaggtaagtccatacagaagagccctctctccctgggatttgagtggggtccccagctccacccagaggcccctggggaattccagggtcactgttccttcctgtctccctgtgggaatcaagccagctccaggccagaagtgggactgtgaggacatggaggcctcggcactgagctgcagacccgcagaccaactcctgagctttctgggcctctgagtcttgtcctcctggtgtcaggtgagccaggcctgagcctgctctccccacccacccacatacgtgcatgaaggtagttcccagggctgaatccgtctttttttttttcttttgagatagagtcttgctctgtcgcccaggctggagtgcagtggcatgatctcggctcactgcaacctccacctcctgggttcaagtgattctcctgcctcagcctcctgagtagctgggattacaagcacatgccaccacatccagctaatttttgtatttttagcggagatggggtttcacatgttggccaggctggtctcgaactcctgacctcaagtgatccacccagcttggcctcccacagtgctgggattacaggcatgagccactgtgcctggctcctgtcttttgacttaactgagagcctatatatagcaggtgatgtgctcacatgagatgccagtacaatttcttgagcatctcctagagctgggctgggctttatcagctcattgaattcctccacgcttggaagaggaggatacgctctctgcattttactgaggagggaatgggctcagccaagacagttgtccacggtcacacaaattaatagcagatcaagagttgaacccaaggctgtctgacccctaaggctttactacatcatcagggtcataacctgctaggagtcacggaaaagtggctccccaactctgggcctaaatctctgcatcttccaagtgagaacacacttcctgcctcagctctcagagatgctagggggccagagggtccccctgttccccagcgaggaaggttcttcccttcctacccagacctcaagggctcacagcagctcctctcttaggaccagcttttaagggcagggactttaaaggccagtggatctggattcaaatttggacatattatctcctgtctgcgaacttggtctctatcaactgaggctaagaacaggccctccctagagagatgacctaggagctaggggctccttgtccacccagccctgcccccgcagacctgtgttcctcggatgtttgcacaacactcattttgtttggagctgaaagaactcagcctctctgtcacagtcttgaaattcagctcgggacccaaatttgaacatttctgctccataagccagaatcctgttattcagaggcctgccctcatggagagaatgagggatcccgggggttgcccccaactctcgggagcatctccaccaactccctgagagatttctggtaagtccactattctccatcttttcacacttccagggaccttcttctgccccaggaagctgccattgatttaattcctatttaactgcaaggcataagcacagtagcacctcctgtgtgccaaacactcctttaagtgcgttacccgggttaagttattgaagcctcacaacaatttgtaagataggaactctattgccgtcatttacagatgaggagactgagccgtggtaggtggagtaaggtgcccagtaagcacagggcggaggtttgaacccagatagtctgcccccgagtccatggccctggccattaccccctgtcagttagaggttttggtaagtgatgcccgtaaaatgcttagttcagggcctagcacacattaatgtgctccataaatgtcacttaatgataatattcttattaattggagcttatatctctaagtggggtgaaacctcttggcttatctctgcctggcctttgcccatgtcaagccgccaacttgccacaaggcccctaatgaggtcgttcagtggggcaccaagatgagatcgaacccaggcactcattaaggggtcacggagggctcatcagctgcagccaggggctgggagcgccgggtggggctaagagaaaggggaaaggagccgccgggaggggcactggtctgatcgtccattcctcacaccacctctgggccttggagatggcgtgcggcaggtgccagctggagcttggcctgaagtcagcaggcaggggactggggagtttgtcacactcagatatgggtgtctgtaaatgcacacaaatatgggctaagaatggaaggaggaggggagcccctggcctgagccctgctaggcccaattcagtggccctttttccagctctgggactcaggcctgcctcattaactgtcctcacccatttctccttcctccagttcccaggattctggccttttcaggggcctctccaacctctttctcagtcttgtttataaccctgtcaactatttctacagagattctgaaactggctgctctttcctccgatcactgccctggtctgggccaccactgcccctccctggtgctgtggcctcctgattggtctcagccatctactctggccttcctctctacgggccctgcagtgctgtagttggagcaagagccttaacccatggtcttcccagctcattccccagcttccccatctcactcagagtcaaagccaaagtccacacatgggccttaaagttctgcaaagcctgcattgcctctctgacctctctaaggctccttgcttagtccacactggatgtttttcaaacatgccagacctaggaaacagagagtctgggttacttgcccaaggtcacacagcctttaagtcacagagctgggattcaaacccagaccactgggcttcagagtctgctctttctcatgacacacaaagtttcatttcttcctctgtgcacccctacatggaaaatattatgttttactgacaagggcaccaagggccttagaggggagcgctcctgcctgggatgatgtggtaaataggggtgggagatggacttgacctgcaacccctgcgctcatcctccctccctccctgggctcctgatggtgggcttcttgtgactgtgttgcccaccaaggccggaagaggaccagacagtgccccagcacagcagctgtggctgaccagggagtagggatcatctaagaacagagcgtgcatggtgctcacgcctgtaatcccagcactttgggaggccaaggcgggtggatcacctgaggtcaggagttcaagaccagcgtggccaacatgggaaaccccgtgtctactaaacatacaaaaaattagccaggcatggtggtgggcatctataatcccagctacttgagaggctgaggcaggagaatcacttgaaccagggaggtgaaggttgcagtgagtcgaggtcgtgccattgcactccagcctgggcaacaagagcaagactccgtctcaaaaaaacaaaacaaaagaaaaaacagagggtggccctatgaggagccttcgcttgtgtgggtggccagggacagcaagaggtgccagggccctaggaacagctctttcctgcttcaactttgggctccagatgggcgctttccagctcagtctgagcagcttcgggaagctgtgtcccatgggagacactgggagtcccctgtgctctttgtctcctgtcgggcccccacattagctctctggcctcagctctggcttccctccaatttgtttcccacgcagcagccagaggagctttcaaaaaggtaaattatttcatgctagtcccctgcttgaaatcctacagtgccttcccagtgctttcagccaaagccccagtcccttcctaagcccagcctggccctgcctccctggtgcatcatctgcacaaatgcctgctctctgacctccagccaccctgcacttccaatgcccgcggcttcctgcctgcagctttagtacagacccctcccctgcccagaactgcccccaccccaaggcttctgctgaaatgtcacctcctcagagaggccttccctggctgctctgtctaaactctgtgttgagaagttccttcttgatggttgttgaggagggaggctggagaagaagaatcaaagaggagaaatagaaagcaaaataatttgttcttggggacgggctggtgctgggcacggggaggcgcccgtctctggtgtgggcagctgggtagatggaggagccgtatttggaaatgtggaacccaggaagggagtgatctagagggaggggaaaggtggcgcgagatgcctgcctctcaacaggtagccagacacatgggtctgtcttggtcactgctatctgcccagtgcccagcacatcacaggccctcagtggtggtgtgtgggcatagagaattagaagctgtggacctctggatccggagctgaaaaccaccaaaggagatgagttggcctggccaggtgtgtaaaaggcagagtctgagagagaacgaccagagggcagagccccgcaggtggagtcctgggggctggagggagaccattaggagaatcgcacatggctggcgcagcaggtcccaggcaaatgtggccactgggtttggcaatatgggagccagagccctagtgtcatctccctgccttctacccagcagttcccagagtgatatccccaacagtgtttgacaactggtacaggctcttcagcggccacagttactgggcaaggccttgtgagggtgactttggggcagctggccagcagtgggaggggaagcagtctcaggggtacctgaggcactgagctccgacctccaggtgccaatgccgcaccagggcaccgttcccctgcaggctcttacagggattaggggctggtaaggagcagtgattaggggctgactagcaggctggtgggcaccagcatgaccccttggtggtaccctctgggcactcatggggacttgggctaacagatggggaagggagcacattcagggggcttaggaaacatatttatgtagggaagcattttaatattttagtaacagaagctattaaaggacttacaaacttacttacatacactaaaacactatttggtcaaacttctgtttctttggcactttcctcctttattcttttttatttttttgagacagggtcttgctctgtcacccaagctggagtgcagtggtgcaatcttggcccgcagtagccttgacttccaggctcaggtggtcctcccaccttagcctcccaagtagctgggactacaggtgcacgccaccacgcctggtgaatttttgttttgaaggggtttcactgtgttgcccaggctggtttcaaactcctgggcttaagtgatccgccagccttggcttcccaaagtactgtgattacaggtatgagccactgcacccggcctcctatttttctgcttctgctttgtggataattggatgcttggacctcctgatttaatcttctaatttccttaactgtttactcctatttttcatcatcttgtctttttgttctactttgtggaggatttcttcacttttagcttccagttcttttcttacatcgtgacagttgctgccgcattctcttgtaaatttccgagggctcgttcttgggttctgaatgttccctcctttcaaggatcttctcatctctttgaggatattcatgtcttttttgttttggttcttaggttttcatctgttctctgtgctgtttcctcggagtgcttttgtctattctgttgttttgtccctcatgttagaagcatttcttttttttttctttttttttttgtgatacagagtcttgctctgtcaccaggctggagtgcagtagcatgatctcggctcaccacagcctctgactccctggttcaagtgattctcctgcctcagcctcctgagtagctgggattacaggcacacaccaccacacccaactaatttttgtatttttggtagagacggggtttcaccatgttggccaggatagtctcaatctcctgacctcatgatcctccgaccttgcctgggaggccaaagtgctgggattacaggcgtgagccaccatgcccagcctagaagcatttcttaatgtctggtgttctctggctgttgtatcttaaaaaaaaaaggggggggaaactgaggctcgaggtgaccttgtgagctggagcagagccgggatgggatgaggaggcaggagcgtgtgcagaagagagggagcccccctgagctcgcaccctgcttcccgtggctgggaggggaggccgagatgcttggggagaaatggaggctccaagccagaggggctgtttccagcacgctcttactgagcgctgctgtagtccagcttggtgtggcggctgtgggcagggaggggagagaggtctgagctggctggcggcccactgggcccctcccctgagcctccaccggccctctcccagtgcgctgggctgggcaagcctctgatgtgccagccagatggagggtgaagtcctgatgcctgcccctaccctgggaattgtgatgctgcagttactgcccctgataacccctgactgggcataggaccagctggctgagccagctcctggggctgaggaggaagccatgaacttgacctggcactttccttgtctccaagcatcagtcaaccaaggatatggagggggtgtgtgcatgtgtgcacacatacacacacacacacacacacacttcaacctgtttatcccccttgagatttgctgacttgtgcattgggggtagaaggtgctggaaaaattccggtcctggttctcagtttccccatctgtccagtgggagcagctggactgagagacgcccatgtctcctgctgtggtcctgcaaggaggctggcgctcctgagtctgctccatcctggcctgtcaggcctgcctggatcctgccccgggttggtccaccactcactgttttgtttccaggaggagagggatcgccctcccagctaacacagcagaggggctgctgaacgtcattggcatggacaagccgctcacccttccagacttcctggccaagtttgactactacatgcctgctatcgcgtgagttgcccccaacccacaggtcctagggcagcattgatccctatgactaggaccaggcctgtccctcagcctgtgggggccagagaagttgctctgaaaccacagctgtctttctcaccattgtgtacacttagtgagtctctccagtgcctttaggcctcagttttcccttctgagatgtgggtgtgatggactgaaattgcttcaagttctacagagaaatggcagaatatgggagctaagaacacagggtcagaggcagtgcagggcttgaacccgggccatctatctcctagttcagggcttcgtgttgtgaggggaggagaggcctgaatatagggtgggggcggggagatgtggggaagattctccaaaaggctttttctttttcttgtcttgagtcgccagggaacagcactaggtaccgaaaaggccagaaggggtatgggcgagtactagagagaaatttccatgactgctttatttatttatttatttatttatttatttatttattgagacagagtctcactctgttgcccaggctgaagtgcagtggtgcgatctcagctcactgcaacctccacctcccagtttaagggattctcctgctttagcctcccaagtagctgggatcacaggcacccaccatcacacccaactaatggttttgtatttttagtagagatggggttttactatgtttgccaggctggtctcgaattcctgacctcaggtgatctgcccgcctcggcctcccaaaatgctgggattacaggcgtgagccactgcgcctggcctccatcctcatcctgaagatgcaagaacttctggtgaccccttctcctgagagtggcctgatctcccctgggcagggcactttcttcccacgctgggctctcccacgacttgtgtgccttccctcacacattctagtaaccacttcattttcactcttcatggtgggaacttccagctaagcacagtccaccgttacgtgatcaacacagtggccctggcaggccaatttgtgccttgcttctggaacaaacatgcagtaataacaacgaaaatgttttgagcatttgtccgctctgctccaagcactgacccgggtggggtttatgaagtttgactcatttgtccccgcaataactccttgacctaggtgtcagagggtgactaaccaggggtcacacagcagataagtgtgggcacaaggatccaagtccatgactgtatcccacgtgtctcccacatccaggcatccctctggacttgtccagctgtgtccttttctctcatttctcttccctgccagccttaactccatcaccaacaaatattgggctactctgtcctaggcatggtcctcagctgagaggtcgcagccatcccaagacagaggggtccttgccacatggagactgcattctagtagggaatacagcaaactggctgataagccatatgacacacaatgttgagtagtgataaggacctgggagaaaaagaaagcccaggagaatggtggaggggccgttttaagataaggcggtctgggccaggtacagtggctcacgcctgtatccccagcactttgggaggctgaggtgggcggatcatgaggtcaggagatcgagaccatcctggctaacacagcgaaacgctgtctctactaaaaatacaaaaaattagccgggcgtggtggcatgcgcctgtaatcccagctacttgggaggctgaggcagacgaatcacttgaacccaggaggcagaggctgcagtgagctgagatggcgccactgcactccagcctgggcgacagagcaagattctgtctcaaaaaaaaaaaaaaaagataaggtggtcagggaaggcctctctgaggaggtgaagcttcagctggctctaaaccaggggagcgggagagacgcagtgtaggacagtatcggggaagagcaggcctgtgtcttctccggtggcctcagggaatgagggagaaggaaggtgctggggaggctggcaaggctggaggatgcaggcttgtgggcaggacctgggagttgcgatgtcactctccgtggcaggaagctactggggcttcgaggggagaagtgatatgctttgatttaccttcttaaaagattgccccaactgctgggtggagaacaggatgacaggggcaagcatggagacagggaggccagttagagatggcgtgattcaggccaggatgaggggtgagaactggtatgcagttccaaagtagagctgataggacttgcccagtgtctggatcttatccagtggatgcccagagcttgggtctggggatgaagtgggtttaatctgccaagggttggggatgtcatttgctcctggagctcccaagggacttggggaaggttgttcccaacccctttcttcccttcccaggggctgccgggaggctatcaaaaggatcgcctatgagtttgtagagatgaaggccaaagagggcgtggtgtatgtggaggtgcggtacagtccgcacctgctggccaactccaaagtggagccaatcccctggaaccaggctgagtgagtgatgggcctggaaggggccatgctgagggtgtggctgggaggctcagctctgagactggaagggcgaactgctgggaatccctgacccaagcaagaccttgttcttgcccccagtctggtccatggcctcagaaagatgggtttaactctgtcacaagagacgtggttcccatcctccctttgccgttatgttcttaccttgggcacaagtgtttggctgtgtcttgctctggccacaggcctgctgtccaggaatgttaacctgcttagccacccaggatttctgaggggtctcccttgtcactgatgctgatcagatctctaaaggccctaaaggtcctgctctaacttcataactgaagtgagtctggcccatttctagccccctgcctgggcccccatggatctctaagtggtatcacaaaaccaccctgccccattttctgagccatgattctgatacatatagaatgtgaacatcatggcaggcccaagcttagcaatgctgtccatctgggggtggggagggccatgttgacaccccacacctcccactaagatctaggagcacccagctgctttaagagctagagggacatgctagggcctgggggcatctctgccagtctttcctctgaggcagtgggtcagtgggggaggagggtcctccccaaagcctcctcttcctcctctgtcccagtcccagagctgccctttaggccttccttttgcctcaggcccatccctactcctctcctcacacagaggggacctcaccccagacgaggtggtggccctagtgggccagggcctgcaggagggggagcgagacttcggggtcaaggcccggtccatcctgtgctgcatgcgccaccagcccagtgagtaggatcaccgccctgcccagggccgcccgtctcaccctggccctgacctcctggcctagcagtggggctgtacctgatctcccctgtgccccacagccccatggtgtccccttgagcccactggcatgaacttggggcttcatgaaacaactggagacctcctaggcaggctcagaacttctggagatgttctccccagggacaccatgcctttatagccaccctgcaggaagctcaacaccaaataggaacgtaactattgaaaaaaaaatctaggctagattctgatcagcccatagtcctccctcgagacccagtggaccaggccccatcctgtctgggcctgaataggtctgatttccaagatttctgaggggtctcccttgtcactgacgcagatcagatctctagagtttgtgcctcatggtgcacagcctcactgtgtgatattgggcaggtcacactgctgctctggttatgcaccaagacacctcagttgtgcactgtcacaaggagatgatcacacttacttcattcctctaccctcaggattagtaagaaccaaagagctacctgcacgcatttcctctaatcctcgcagcagcctgcaaagcagaactaccattgcttagtcccatttgacagatgaggaaactgaggtggagtgaggtgcagcctcttgcaaggcacaaaccctggatttgtatccggggacatctagttccaaagcctgtgttcattcattctttcttaaacacttcagaataactttattggttaagagtacctaatacattagcgagatacttcccaatactagtgtgagttctattttagatgacgtgttaaacggtcctccgtttcctcatctgcgcatgggaataagcctaccatgagtgttgttggaaacaccaggtgagagaagggtccgtgtcatttactgagctcaggccccgtccttggtgctttacacacatggcctcggcaaagcctggccgtgaccctgtgcaatagctggcagggttctttctgaaaagggcggaaactgaggccataagcagagcagttttccgcagccatgtggttaggacatagcagttaggatttgaagacactgagccctgttttgtgctggcctcccatggggggtttgggtgggacagcaggcaggtaggctgggaggtctctccatggtgctggtgacagagcctgggtgggcatctgcccacagactggtcccccaaggtggtggagctgtgtaagaagtaccagcagcagaccgtggtagccattgacctggctggagatgagaccatcccaggaagcagcctcttgcctggacatgtccaggcctaccaggtgggtcctgtgagaaggaatggagaggctggccctgggtgagcttgtctcccacccatagttgggagaaatcacaagaaccagggaccatggtgtctcctgagttctgaagtgtgtctttgttgggtcttaaggcttggaactggaatccccctgggccaggcgtggtggttcatgcctgtgatcccagcactttgggaggcgaggcaggaggattgcttgagcctaggagtttgagaccagccagggcaacatagtgagatccatctctgcaaatacaaaaaaaagtagtcaggcatggtggtgcatgcctgtagtcccagctacttgggaggctgaggtgggagaattgcttgagtccaggaagtcaaagctgcagtgagctgtgataatgcgactgcactccagcctgggtgacagagggagaccctgtctcaaaaaaaaaaaaaaggaagaaagaagaaagagaaaagaaagagaaagaaagagaggaaggaaggaaaaagaggaagggagggagggaggaaggaaggaaagaaggaaggaagggagagagaaagaaaagcctccacttggtgttgggagtcctgtgctgagcctgcttctggctgtgatttgctgtgtgaacctgggcaacactgtgtcttctctgggcctctgtttcttctattgggatgactgagttggagccgacatctcaaaagtcgcttccagcgtgatgatgaatgggcctcctgtggagggtgcagcatggtggagaagtcagggctctggagtcccactgcccgggctcagagcttggttccacacttcctgtctgaccttggtcacattacttgaatctcctgagcttcagtccttcatcataaaatgggtgggataatagttgtgaatattagataatgtatacaagtcacttcatatactacctgacacatggtaactggctaatgagtgacagctaccacttagataaggacttggagggtaaaagaccaggtttccccatgctgttgaagcaggcagcatgactaggatggttcaatctccacagcatggtcaaggcaggctgccggggccctcccgctagggcacccatgacctggctctcccccttccaggaggctgtgaagagcggcattcaccgtactgtccacgccggggaggtgggctcggccgaagtagtaaaagaggtgagggcctgggctggccatggggtccctcctcactgcctcctcccatacttggctctattctgcttctctacaggctgtggacatactcaagacagagcggctgggacacggctaccacaccctggaagaccaggccctttataacaggctgcggcaggaaaacatgcacttcgaggtaagcgggccagggagtggggaggaaccatccccggctgtcccaacttcctgtatagagaggcagaaagcagggcgggtcccaggaactcgaggggtggccccaggcccagacatggggggaggaatcagcatggcctggggccatccctgccagccacacacctgctcttccagatctgcccctggtccagctacctcactggtgcctggaagccggacacggagcatgcagtcattcggtgagctctgttcccctgggcctgttcaattttgttccaggaaggccaaagagggaagaaactttagggattgggcatcagcccatgccgcgtcttttagatatgaaatctcttcgacaccctgggaagcaggcattgccgtcctcatcttacaaatgaggaatccgaggcccagatgtgctgtggcttgactgggattacccagctgctaaccagcagagctggggccctacagctcatcagctggagcagaacgctccattactctgagggaagcttccacacttccaattctcccaactctgccccctgggcatcgcataggaagcaggagtccctctggccagcatgttctctcttcctgacacctggcccttgggacccctgggcattcccctgagcgccatcttgaagctttccaccggaggtctgttccaccctgcctggctcccatcctggagtctaaccagggtcaaggccctccttccgtcctgtcgccaagccacaggagcagtatcaggccttaggaaaaagccgccttccccaagacaaggacagcaagaactcagggtgaccatggtcaggccagcacttatccatctgccaggcatatgagaaggggaggggcttcggctctgatgttctgatgacaagggggtcttggggcttgcttagggacacgtggcacctgtggaggttcttggaggcatgtgggtataccatgggctggaaaaagatccaggagtcatctgcacagatatggtggctgaaggagaagcagtggccccaggaggtggtggagcaagaagggcctaggatagaacccagaaggacaatggtatttaagggaccagcaaaagagacaagtaggaggaaagtcaaaagtgtggtgtcacagaaatccagggaaaaggtttcaagaaacagtcaacagtgtgaaattctgctatgcaagtcgattatggtcagagctaggaaagatccattagatacaacaagatggtggtcagggatcgtgccaagaacagcttccatggtatgttggagtagccagctcccagtgggactgaggaacaagcagggtagggtgcagaggggaaggctggagagggtggcagccggagggggatgttgctttcttggctcccacccccacgcccccaccggctgccattctgcctggttcccatgtctggcccctctgctgcctttgcccagctctggtcttcaggatgggctggattctggactttctggttacatagacttgaacaagtcacctaagttctgaatttatttccccctctgcacaaggatcagatctttcagatctgtttgaggctgctgtgaggatcaaaggcgggtgaacgtcaatgtgttctgactatttatgtaagagtaaaaggaggctgattctctcctcctccctcttctgcaggctcaaaaatgaccaggctaactactcgctcaacacagatgacccgctcatcttcaagtccaccctggacactgattaccagatgaccaaacgggacatgggctttactgaagaggagtttaaaaggctggtgagtgggtgtgagccatactggccttgactcgggtttgggagtatggtatctacaggtccagtccggggcctggaatctttggagagagggagtgagtctgcctcaacagtccaagacaagcccaacctagacactttccacagagaagacatctttgtgttgacgtcctgacctaggaccaggtttttgatcctttgcttgggttgagtgcctttaaagaatccagtgaaagctgtcaaccctctccccagaaaggtgtgtgcagcagctatgaagtcttgcacactctcttcaggttgttcttaaatcccaggctgaataagtccattcctgcacgtgtctgcgaggtgtctctggccccctacatgccaccctgtctctcaaaggtttctccaacttccttctcacagccctttttcatgtaatgacaaattaagaacacgacctcatggtctctactctggcacttgctgccgtgtgacagtggacaaatccttccccctctaagcgtatctgcccatgttgagtgaagaggatggactatcactacattgctaagagctgccttctttgttctctggttccatgttgtctgccattctggcctttccagaacatcaatgcggccaaatctagtttcctcccagaagatgaaaagagggagcttctcgacctgctctataaagcctatgggatgccaccttcagcctctgcaggtaggttcctgtctgggcttctgggcagttgcctgtcctggccccagtgtggctttctgtgggacttctagcaagatgcccttccattcttgggcagcgcatgaatgtgtgatgactccctggtttctgggccctggctgggagcagcgtctcattagatcggtttgttttctataaaagttcttgagaggctgttctaaggggagactttctgaagcccagtcccaaaggtctgggcagttggggacacctccatggctgcccaaagccaagggcagggagaggggcccaggctgttctgctcctttcttcctatgtggtcttggcaaggcatcttcttgccatcataggaaggagttcctttctggttctggtgttctatgatttttacaacatcctgggtactacaagttgcctgatctttttgcttctctgaaccaacgagcagggcagaacctctgaagacgccactcctccaagccttcaccctgtggagtcaccccaactctgtggggctgagcaacatttttacatttattccttccaagaagaccatgatctcaatagtcagttactgatgctcctgaaccctatgtgtccatttctgcacacacgtatacctcggcatggccgcgtcacttctctgattatgtgccctggccagggaccagcgcccttgcacatgggcatggttgaatctgaaaccctccttctgtggcaacttgtactgaaaatctggtgctcaataaagaagcccatggctggtggcatgcagcaggtggcatgtaatttggtggtcttgggcgggccgatgtgggcaggatgagcatggagggagctgggtcagcctgctcagcagcagggcctgagcctaagggtggctgtgaatgccaggccagagatcccaatgctgtgggccaagaggggtccagaggctgtcctccttccagaagaaataaggcttctctggttgttgctcaaacattccctgaactctcagcccctcctaactctaggttttaaggagtaaagcttccttttgggttcctgaagctggcagttggggtgagagcagatgagatggaagagggctcatcagacactggccttggagggtgctggcctctgcagaacgccagcatcttctcagaatcgtatgttctagaagcctgggcgaagtccggctaattgtggacttggggaaaataaggcccaacccctgtttttgcaaggttaaggagaaataatcttaaaccagtcacacaaatcatcggcatttatttcctgggtcctaggtgtcacttatcctggtggacagggcagaggtggtcagatcgttttgagccaaaatcccttccctaaaaatggatctgtggagctccatgagggaacctcagagatgcacaatgacagtttagctaaaatggcttaaaaaatgtgaattgattgtcagctctctccatatctgctgaaaaaaggtttaaaatttttaaaaagtttaaaagtgttttctaaaaaagggacaagcaggtctggacc

SEQ ID NO: 61 - DNA, 147708 bp, Homo sapiens
  Genbank Accession No. Z97053
gatccacccaccttggcctcccaaagtgttgggattccaggcgtgagccaccacatctggccaaaactcagtctgtgtggcaagtgacagccaactcacgttagctgaaacaaacaaaaaaacctcagttgctcagataactgaggtctagccgtatttccattcaggggcccaaactctggcactggaaagctgtccccaccactgctgtcctcaacaggggcttcactcccaggccagctctcttgcctcatggggcccgtgaatctcagactcaccgcctcaaaactacaagagggaagacagaactctttccaaagggccaggggtcctagaattgagtctccttgactctgcttgacctggcttggatcacacactgtggccagaaggatgtgctgtcagattggccaatcaatccccagtcacttgctcacctctgaagtcaggagtcaagtcagttctatccaaactgcatggctagagtgggaggaggtggttccctaaggaaaatcaggttagtgctatgaagataaggggaaatacatgatggcagaaagcacagatgtccatgaaggtaggcattatcaccctattctacttatgaggacatcggggctcagagtgaggtattatagtaacttgcccaaggtcacatagctagtaacattcaaacctcaggtgtgtctgacttcagagtgcatacttttttttatatttttgagacagggtctcaccctgtcacccaggctggagtacagtggcatgatcactgcagcctcaacctcctgagctcaagagatcctcccacctcagtctcccaagtagtgagactacagccacaccccaccatacctggctagtgtttgtatattttgtagacatggggtttcgccatgttgcctgggctggtcttgaattcctgggcttatgcttaattcctcccacctcggccttccaaagtactgggattacaggcatgagccactgtgcccagccagagctcatgctcttaacctcaacactcaattgtatttccatcacaaaatgtgctgctgtttggagttaagaaaccagctgctgcttattgttccatttactaacctaaataagagtcatggctactagaatatctttcttttccattttgaaacaacagtgatagaaaggagataaatctttgtttgaccacttatttatattaacttctgtaacatactgtcaatctcttatgaccttagacagatggataccaagcaactatccaattactgaaaacatccgagccatatacttgaccttagaaaaactcattcagtctgaagaaacccaggtgaatggaattgtaattcttgcagactacaaaggagtgagtttatcaaaagcatctcactttggcccttttatagccaaaaaggtgattggcatcctccaggtaagacccgtatgtgtcctgcctgtttcgtggtggctctggctttccccagggcctgtccatttactgtgggtctcacatgatacacaaactgcacatcccacacctgcaatctgaaaaacacaaaagcattatgggaagaaatttaaaagtcctatttaccacttgttctcatcagtctctcaagtactctctggagtaggtacttcagtaagacaagagtccaaaaaactagagaatttgcttgttgccttttcttggtctggaaggcagaggaagaattctcataacaaacaaaactggctgggcgcggtggctcacgcctgtaatccaattctttgggaggccgaggcaggtggatcacttgaggtcaggagtttgagaccagcctggccaacatggtaaaaccccatctctaccaaaaatacgaaaattagctgggcatggtggcaggcacctgtaatcccagctacttgggaggctgaggcaggagaatcatttgaacccaggaggcggaggttgcagtgagctgagatcgcgccattgcactccagcctgggtgagaacagcaaaactctgtctcagaaaacaaacaaacaaaaaacctaagaaattatgcttctgcgtaaggtgctggagcccctcctgccctctgtggacctgagggatatggtgttctgttgggctgtattttggtcagatgcttcacacctcatgttctgtgtttcagaacatgagtcactggggactgtggtgctccctccatatctgcaccgtgtttaacagcttgcacagtgcttttacagtcatcagggcctattcagtccctcagcgaatcctctgagataggcaaggcaaaaactatttttcctttttgatagatgggaagatggagacctagagaaaatatagcctgtcacagctgtgacaggttttgattacttgttcattctgacccaccacgtggggtgttttcccttgtaaactatggggcaccggtggtatagtagctcttctcactgattccacaaatgtttcagcccctgtggtgcaccaggtttattatttaaataaatcagtgcacatttggacattatcaaacatttggattctggctttgagccaaccctggctttccttcgctggcactccttttgatgcctcctcctgaataccttgtagattcaagtgtcaggatcaagagtgtggatcagtgttagtaccgtaagatcatctggagaggagaaaaaattaagtaagtttgggaaatgctgtatagcatgtccctttcttgtgaatttcactgtaagaatttacatgttaaaggctctgaacaggaatgcagttaaggaaactcacttgattatgcttagtggactacgtttctcaaactcatttgcctgctgtggagccctgttttatataacctctaatagcctgagaaatatactttgggcaacactgatctggaaggtctggtatttgccagatctgtccctgtagactcagactgttttctgctgtaagagcagcagctcttcatatgtttgcctctcttcttttttttttgagatggagtccaggctgtcatccaggctggagtacagtgacacgattttggctcactgcaacctccacctccagggttcaagcagttctccagcctcagcctctccaagtagctgggattatagacacgtgccaccatgcccagctaatttttgtatttttagtggagatgggatttcaccatgttggccaggctggtctcgaactcctgacctcaagtgatccgcccacctcggcctcccaaactgctgggattacaggcatgagccactacacccagcctctgtttgcctctcttctaacccagttttgggtcccaggaaagactttccctgaggtccgtcttcctagttaggccccacgtggactgtcattgaggaggccataaggatcagatcagactgatgttggggctgaaagtgaagatttaacttgggggaggaaggtgtggaaagattctccagatgttctaaacccctttgcctttcccacacaggatggtttccccattcggataaaagcagtccatgtggtgaatgaacctcgaatatttaaaggcatttttgccatcataaaaccatttctaaaggagaaaatagcaaacagagtaagtgatgatcctattgacttcagatttttcttttcctctgttgatttatttgtgacatctggtacttgtttattatttttgccctggaacaactaatttggaaaagtacagagttacagataaaataaatgaacagtcccttttgtgaggagaagatggaagagtaaatgaacaagaatttaatatttgccagtagagagagcagaaccaggatttttatcataagagcctccctgggcagtatagcaagactcatctctaaaaaaattttttaaattaggtgggtgtgcctggggcacagtggctcacgcctgtaatcccagcactttgggaggccgaggtggatggatcacttgaggtcaggagttcgagaccagcctggccaacatggtgaaaccccgactctactaaaaatacaaaaaattagccaggcatggtggcacatgcctgtaattgcagctacttgggaggctgagggaggagaatcacttgaatccgggaggcggaggttgcagtgagccaagatcatgccgctgcactccagcttgggcaacagtgagactgtctcaaaaaaaaaaaaaaattaggtgggtgtggtggcacatgtctgtagtctccactactcaggaggctgaggtgggaggactgcttgagctcaggaattcaaggctgccatgggcttgaacaatgggctatggtcttgccactgtgttccagcctgggtaacagagcagaacactgtctctaaaataaattttttttaagttatggtcattagaactgtggggtttaaaaatgctacttaagcctttccatttgcctaatatgttgtcccactgtacagtttgtggagcaattcaaggtttacgagctatgtgagtttttagcttacctcttatttaagaagggataaatagcactttgtcttcctttctgacccagaagagccaattccctcttcagcctttcccagtcccactgattgaaatgggatgggtggtatttttctccttccctaggcctaggaaggtcactgcaaagactgggccctgaattttacttgctttttctttttttgagacggagtctcgctccgtcacccaggctggagtgcagtggtgcgatctcagctcactgcaacccctacctcccgggttcaagcagttctcctgcctcagcctccccagtagctgggattacaggcacgtgccaccacgcacagctaatttttgtatttttagtagagataggcttttaccatgttggccaggctggtctcaaactcctgacctcaggtgatccacccgccttggcctccgaaagtgctgggattacaggcgtgagccaccgcactgggcccttgctttttcaaagtaacatatatagatggaaaatctcaaggaggtaagggagggaacttgaaatccagctccagattcctaggctctttccctgaagattttgattcatcagctcagggatctgtgctttaaaatccccttaggaaattctgatgcacagctagatttgcaaaccactaacttagtggcttccctgactgtatgtgaacccatgtgggtccctaaagattctgtttggaactttcaccaaagcagcctttggacaggtcttttacatctgtgaaatgcgctgatttggggcccacaatgttcttcgtttgttccttcataggttcctttattcagaaatatctattgatcaactctatgtacaagcatgttctagatgaacaaaacagaccaaaacccctgcccctaggaaaattatattctaaagggagccacagtgaattatctagtattagaatgtggtaagtgctacagagaaaaataaagcagagaaaagtatagcgtgtgtgaggtgggaagggttgcagtattcaactgagtggttagagatggcagccttgagaagctgacatttgagcaaagacaagaagtgagagagtgagccatctaggtatctgggaggccagcaaggacacaaccctgacgtgggagcctgtccggcatgctgggagagcagctaggctggcgcagctgggtcaagactggaggggcaggtggtgagaggagcactcagagaagtaatgaggctagattatgatgggcctcagagtctgaggtgggagtgctggaaggctgtacatagaggcacgactgtgattctgagtttcactgaaaagaacttagattgcagagggacaagagtgggagcagggagaccagataggaggccactggaggaatccagggagaagcgatgtggctgctgccattaattgaatagtgtggtggtgaggcggctggatcctggatatattctgaagctccagccaacaggatgtatggtataaggaaaagagaattaaggatactccaggctttctgggctgaaaaagtaagggtagagttgccattaacatttcctttcttcattcaacagatatttatttgagcacctaccatggaggagatttctgcattcctgattaacctaaggacatgtgtgttttcatttcattcccttttagttcttcctccatgggtctgacttgaactctctccacacaaaccttccaagaagcatcctccccaaggagtatgggggcacggctggggagctggacactgccacctggaacgcggtactgctggcttcagaagacgattttgtgaaagagttctgccaacctgttcctgcctgtgacagcatcctgggccagacgctgctgcccgagggcctgacctcagatgcacagtgtgacgactccttgcgagctgtgaagtcacagctgtactcctgctactagcccgtcccccagggtcaccatctttaattcttttccttcttttctttggagaggcacaaggagaatttaagggtccatggattcagtcttgctccttgtaattaaactgcaggatggaggaacagcctgagatatgagcatgagcccattttggggtaagcctttggttactttaattactccatggaagacatggaaaatgtccccactgattcttaaacatttggaatcccagtctgcaactattaatctggaggctatatctattttgttttgctttttggttggggggtggtgatctggttcttacacatcttggaagcaagaacaatcaggaccaaagtcactttgatcccacttttccaggagaaaaaccacctgtttggccagtgagaactacttgtatgaaataatttggccaaaccttcagtgtgaccaaatgtgagactgggagtttgtgtttttcacaggaaccctaagtatagacctctgctgctcatcaggaaacttactggagatgaaggccccagctgttgtcaccgggtttggaaagcaccttaactgaatcatgtaagcatcaggacataagcagcactttgtggtcaaatgtggaagccggagacttcaaagcacctctgggacccactggttgaagtttgcaatagaaacttaagttttcccaaatccataaagccttagccctggttctcaatagaatcagggacctagcaggaaatgattttactcaacctaaaatgctggatcccaggcccgtgtagctataagaattctggcctggatcccaggtgtacaactatggacaagatatgggcctctactttctcctctataaaatgaggctggatgaaatgtcagctagggccattttggctgctgaggctctgggatttggtttagttactgaatgttagattttctgcctagaaagataactatctagatacaagtggttggatcctgtttttgtttgtggtacatgtgtctttccaagagagatgtgtcaccaattagccctgcctttaaagaaactattatgtgtattcctgggactcactgacaccaattttctttttatagtgatggttcaattttgaaaagatggcttttgtgaggccaggttaaggtgaccaggatcttgtatgatgaattccttccatccctgagactctggtactatattgtaaacctggctacagtagttaattacttgagattctttaattttggtctctgagctgggcgtggtggttcatgcctgtaatcccagcactttgggaggccaaggtgtgcggatcacaaggtcaggagttcgagacccgcctggccaagatggtgaaaccccatctctactaaaaatacaaaaattagctgggcgtggtggcgggctcctgtagtcccagctactcgggaggctgaggcagaagaatcacgtgaacccaggaggcagaagtggcagtgagccaagatcgcaccactgcactccagcctgggcgacagagcaagactctgcctcaaaaaaaaaaaaaaaaaaaaaaaatttttttttttttggtctctggaaatgaacacaagggcaggttattcctgggtcacttctgggcccccctgccctcccagccccacttgagtttctctctctggtgtgggtgaaccagtcagcctgaatgttctgcatttcagcactttagaacctccctgtgaagattttagccttagcccaaacatcaaattagacggttcacatgatggtttttgacctatttcctttctaatgtattccacatgatcatggtgttaaatagtgaaaagtactgtgttgtgtgtgcaccttctccgtgcatttattagactaaccagtcaagcagacagctcagttagggagaaaacaatactctgaaatttgaaggccaatctgttgttactaagctgtttatctctattgcctttttaaatgtctggataagttgttggtggaaattaagttacttaacctcattaataccaattctagagaaagttcttttcaccatggatagtaaccctggatcctctacggtactggctgagctggaagtgccaaaaagcactcctggctgcttctggttccatctgatgatgatgtgacacacactgctgaaaaggcccaagcagggcaagtgggatggctgaaggagggaaggagggggttcagaacccactggcctggatgggagaactgggtggaggcttccccaagagggaagacagataaacaaaacaaaacaaaaactgggtaaagaggaatgaatcactcagccctgatgtttcaattctacactgcattcctggccagtcgcatttgttttaatgcaggcatggccacagctctcctagagaattatctcaaagaccagaagggacctggagaggcctatttcttaggtttttccagttggacaaggaaggagtggtttcactcagcttctagaaggagttggagcctaagtttatctgcctccgggagctgcttgctttgttttggctccgaagaggtatcagatagttttgacacctcaggaaacttgaaccaagctgtgaaaccaagacctccctgcgtgaaaatcaaggtggtctccttgtggcttcaccaggatgtttgtgtcaggctgtctcagcagggtggggaatgaccagccagggagcacagtgagccttactcagcactggggagcgcactggtgaggcaaacccatgaacctcaagaactgggagtatgttccttcagggagaagttctggcccattgcacaaacacttggaaattaacttttccctaaattcaagatagtgtggtgtcggaaggaaatgggacagtaaattaggagacgcgggctccacctttaccttactacgtggcctttgatgagctggcttaacatccctgagtgattccatgatagagatctatactccaaactttattcctggtatctagttggcttcactgccacagacactgtactctctctttttagaagtttttttccttttttttccccctcaattggcttatttagtaaatttaggtctgaatgaattggtacctaaaagcttccaaatctatacatttcagaatatgggaattttcttcctcttcttcccccatatcccaacatggaattctggaaaactgtgcctcttcccctgttctgccttcatgggggagagactggatgaaatctacaaaaacagccaaaagtgccaccctggcttcatgtcttgaatttctaacttgctcttggcaaaggtcgctttattttttaatttttttccttgcattttcttttttattctattgctgctgcaaaaattaaggcaaaagtagctttcgatctttcatatttcatcctggtttcacaaggagtcacttatcttaggaggtctgtaagtcaggttacaaggccgggagcggtggctcacacctgtaatcccaacactttgagcggctgaggtgggtgtatcacctgaagtccggagtttgagaccagcctggccaacatggtgaaaccccgtctctactaaaaatacaaaaaattggctgggcatggtggtgggtgcctgtaatcccagctacttgggaagctgaagcaggagaatcacttaaacccaggtggcggaggttgcagtgagccgacatcgcgccattgcactccagcctgggtgacgagtgaaactccatctcaaaaataaaaattgaaaaatcaggttacaaaacaccatttttcccgaaataagacaataagaggcttttctctgaattcctttatattgagcctttcagaattctccctgggtgggcaatttctttaaatagtatttgaccctcagatcaatcctgggaatttttttcatttgggtagcaaaagctagagtattgctgtggcgattataatacttttaaaaagttttaccattttaaagttgccaacatttaattaaggttttcctttgaagcctcctttaatttagggagtaaaatgttagctaaaccaattatatactatatactatacactgtatctcctgtggccatgagaggtgtggctataccgaacagaaacatgcctactgttcaggaaagatgtcagttctggtaacacctctctgtattgggatctgttaattttgtaaatctaaattcttctgctcttggccaggtgcagtagttcatgccctgtaatcctagaactttgggaggctgaagggggggcggatcatttgaggtcaggagtttgagaccagcctggccaacatggtgaaaccccatctctactaaaaagtacaaaaattagctgggtgtggtggtgcgtgcctgtaatcccaactacttgggaggctgaggcaggagaatcgcttgaacctgggaggcagcggttgcagtaagccaagactatgccactgcactcccgcctgggtgacaaagcaatattctgtgtcaaataaataaattcattcttctgctctcctgacttagagaaatggtttgcttaaaatgctagtaacaaacatcacagtcaacaggagcttgcttcatgcgaaggatcaatgtgatttgtggatggagatgatagtgatgaaattcctgtttcatggggctgtttttcttttcatctcactgggcagcaggtttagtgaggcagtgagatgctgctgctgtggattcttgtagctatgcctcggcttcttggcatatcaggtaggaacctgttacaagtgaaatacttgaaacctctctgaccaagagcctctgatggagtgggaggtgagctaattctctgaccagcttggggcactgtttcagccactggtcacattccttgcttcaaactgaaattcagtttggctttgagtatagggatacatggtggattcatgtacttcagtgtttgttttgaccaaagtttatttttctagtgcattttctaagtcaaagtggtgaaaatatgtaataattttagtatgcatgactcagtctgaaacaataaaaatctctgaaaaatgtgcatggggttcttttgtgatgatgacagtttggataaaggttccaaggttcattattcacagcccgggtagaccacctcctctgcaggtgagggagggaggggcactgtgataggacagtgcattctgtagatgcgctggctgcctctgaagatcatacacaattagactgctgcagtatggagaggagaatgcagctagctacacagagcagtagaggtgatatgcaaatttttacattcttgaggcccagctatacttcttggactggccttgagtctttccagtgatagccagcgatttcctcaatgtgcgcatgtgggctgggcacacatgtgttaaggacactcataaataatgtattttaaccttcagctacccttaatgaagctgcattactgttcctgttggcaaaatgtagcttgcccagtgacacacaactagccaaatactaaggatgggattcaaacccaggaagtatgacaagcccactgttttctcctgatggctggagacaaataacgagtccccagatagaagagagagagaaggcaggactctttcatagagtaagaaagaaccagaaattgactttttaactggcttcttgaaaatacaagcagtggttgttaacctctctgaaacccaagttgtaacaacattttattccagaagtaagcccagactccttgaggggtaactggagcacggcttgcccaactatggtcccaggcctgctaagctgtttctatgtcccctgtttatttggtactctgtgccccagagtagacaaaaactaggtccccatggtagatctggtgacttgatgagtcagttgagaaatactctaacacaggaggtacacttttgatgatgcaacaggttaagtacttatattgcagcataaccaccccttcaggtcagcctttcctgaggaaattgtggaacttaagttcagtctgtttctcacatatagaaaaatgaagctaactgttaaaatccttttctctcacagcagtcttatgaggcccttttccatgagtcagtattttcttgatgccccctgccccctccttacacagtactggtttggtacccatacactcaatggcaataaagtttcacattatcgcatttaaagggtaagtaataagaccctttagggtaccactcttctggggaaaacgtttttaacctaatattcatgctttttcctgagtaggtgccagccactagggatagctgacctagtaaaagacatgagtcacttgccttcaggtgactactaacttgtctttgtcagtgatgggtagaggagcaaacactctgtgcctgagagtagacaaaaactaggttcccatggtagatctggtgagttggtgatgagtcattagtgagccagatgactcccctacatgtctctaataaatcctgtctcttatattcttatggcccaagagacactgaggtctaattgaaaaaagaactcttaagccaagccctgggtttctctgtttcacctcttactgagtaaccataggcaagtcacgaacttctctaagcctcaaactgatacgtaaaaggaaggagggagggaaataatcaccaccttacaggcatgtggatactgtctgtttaatgcttggtacacctacccatctatgtggtttctattattcttcttcacctgagaacataggcatggtgtggcttgagtcatccagcagtaattaggacatcactgagttgggtgcctaggtaacaggacggacagaccaacacaacaggagtaaagagatgaacagcagcttccattaataagcataagcctactatctgttatcaatctgcacagatcaaatgcacaactcattatgtgaatactcactttagcctgaatgtgtaaaaacagccaggtgcagtggctcccgcctgtaatcccaacactttgggaggctgaggcaggtggatcacctgaggccaggagttcgggaccagcctggccaacatggtgaaatcccatctctactaaaaacacaaaaattagccaggtgtggtggcgcgcacctatagtcccagctactcaggagactgaggcaggagaattgcttgaacatgggaggtggaggttgcagtgagccaagatggcaccactgcactccagcctgggcaacagagcaaaactctgtctaaaaaaagaaaaaagaaccagttacagatttctttgttccttctccattcctcacttggctagccaaaaagaaaaagaacaaaacctctatactgagaaccaggtccatggctactctttggcaggcagtttctttgattaccaagagaaagttttacttcccaaccagataacccgcaagaccaacctagaaaataaaggagtccagcatggacctagaagctttctcccggctttaacgaggtaaaagtggcagccactgctattgcctttgatgagttcctagagcatgtccctgatctgaaagccagggccccaacccgcattccccaaggctaggcaagccctttcatagtgatgaaacataaaggtactcatctggaatgaaaggccaccctgagatctgatgactcaaaatactcccctgctttaaatgatgatcctggccttattcagaatgctgtcttactcatgcttgtatataattcagcattcacatgtataattcacttgagtcttgattagactactggttttcctactaagaggcagacttcactacttcttaaggtaggaccaagcaaagcagggacactgcctcccgacttttaaagagcatttgttacttcaaattaatatcagttatcatcatgagaaaaaaataaaaactttattggactttgttacatttattttacagtttagtattgtttgtattttgaattacattaaggcggaggatggggcactgtaatgtttttgaagtttaggacctttaaagctcttaagctgactccgctactgtaaagaaaagcagggtatctgcttcacactggcaaaataaggggctacatttccccatctgaccctcaaatcccttgaaacgctataccctgacataaaccactggtttaaaagacaatgattccaataatttatatcaagtcctgcttccctaccccacacctccaccctaactgagcctgtcccctctgtgttcctctgtctaattctgtaacaaaatctgaaatccagcctccatcagattctggctagatatctctgacctttgaatattgtcttattttagcccataatgagatcagcagctactgtcagtgctatgtcagtgctaaaaatgggttacactttgcaaaataactttattctttaacaatcttgtacactaggcaccaacactgaggctcagctgcctgtggtcataaatcaaatagtacgtactcaacaaataatagctgacaagtttgatagccagaaaacggcaaagctgggatgcaaacccaagcagtctgactcccaagcctcttaaccattcttaagagaccacctacctccattcttcttcgaacacatgtttttcctgtttgccacctgaatacgtggaaccaccatccacccagctggttaaaccagaatcactcagaaatctacctctccttcatattattcataactgccagtgttaaaattctaattgctggccaggcacggtggctcatgccagtaatcctagaactttgggaggccgcggcaggtggatcacgaggtcaggagatcgagaccatcctggctaacatggtgaaaccctgtctctactaaaaatacaaaaaaaattagccaggcgtggtggtgggtgcctgtagtcccagctactagggaggctgaggcgggagaatggcgtgaacccgggaggcggagcctgcagtgagcggagatcgcaccattgcactccagcctgggcgacagagcaagactccgtctcaaaaaaaaaaattaaaattgaaaaaaaaaaattctaattgctaagtagccctcacctgtcaatttctccccgtccctacgattccacttctctatttcacatctcatatggactgcacctggtctcatctctctaaatccattctctatatatcagcccaagtgactgaagataaaatttgttcatgacactatgaatatgttttcagccaccctcaacataaggtccaaactctttactgaggttgataaagccctttaaaattcagtccctgactacatttccccattccagctttactgaactttttttccccatcttcctgcctttaacatgcagttttatctactccagcaatgtcgtctcattttcccatctctctcttagctaacttctaagagttcttggcttaaatatcattttctccagaaagcctaccattacaccaaatacctctcctttgagttctctccaattcctaaaccacagcactaattcacattataaccacctgtcagctcatttgctctcttctctaagctattaaagtccaagacggcagagcctctatcatgtttaacactgtaccccaaaacctacagggtctagtacagaatagacagtaaatctttgttgaaagaactcttttattctacctttttgcacaccacctctcatgaaaatggttcttgacaatgccttccgtctctcatctaccaagtgtcttacctagagaaggtatttaggacttttgaataaattcaagactttgctcactagtcagaccgtaatttttagaaggaataggagcatcctgactagaagcgtgataaaacctggctatccagaaaataaagaatggctgctaactataaaagctgttggaagaaagggccttaaaatcttaaaagtctttgtattttaaccaaataccttcatagtgcaaatatgataaattcacatgcattttacttttacatactcataacaagatagtaacacagactaaagctgcagtgttttcccaagtgaatcttcattttaaccaaactcacaaagcatttatggaaattaatacatctggcaaagcaccagacttgaatcaagcagtctcaatgctacagtgtaaaaaaagtaaattaaaaaactcaagatgtagaagcagtagccatatcagcaaccattcttctagggaagggacccacatatacgatccttccccaagaactttgatgctaccccgctgaagagtttaagcacaaaacacagtgcttgtatcatataagtaaggactttcatagaggaaaactgtaatataaatgcatttttttttttttgcttttaaaggatactgcaatataaatatattaagcatggcctcaaatatccaacattttcctatcttacattttaaaccaaagttaaaagaacctacaggctttataaagaactctcttcacagcacagctgtagttcactttaaacaaaaaatgttccctttgtgctatatccttagaagtaaacataatatacagataaatgagaagtttcgattctgcatcaagcattattcaatctcaccttctgatataaacctgcatacagtcaaacttgcaaagcattcacttaatattttagttgaaacaaacttaaaaggtatatgggttttcggtgaaggagacctttgtgagttccagtggtgtccttggcactcagaggttcagctgaagtcccgactggtgaggacaagtggagccacaagggtccagacgtaaagcaggaggcagacccagctggagctgatcttgacccacacagctggccacttgctggtcatgctctgaaactttgcatcagggctaagaaaacaagagagagtcaggtagaaaagcctggtctacctgacttctatcagcctcctgcagccccccagccaaggccaagaaattctccagtgaaacttggctggcactaccccccagtagggttgaaggggaccagaggaagctgctatttttagttcttatgaccaagaactaaacagctcattgactctgcctctcaaatgacttttcttcttgccagcatgaaagaccctatcagggcaaagttctttaaatgttcctagttactggcaaaggtctagattgagatagcctccctgaaactttccttccttagtacattattacgggaaccagaatgctctgacatggccatctctatacacagaaaattagtgaacaaagatgggtcagattgctttatgtcatgattttctctctcaattaactcaactctgtaagagctcccaatgatttgcattgcaaagaattccaatgggttttaaatgctagaggggataaagtcaagagtatttaacccaacttcattatatgggtaagagcaagggttctgaggtcaggacaatggatgagattttataggccatccaagggttttatggtcttctgtctgttttgtctgtgtctcctacctgtaccagctggtcagggtcatcatgatgtacaaggaagccaagcagagcatgaggtggaataaggagtagctatactgcactccctctttctcgttgtccacagcccgccgaggctgtccatcttcttcatcactggcaccactggtagttgtatcaccaaggatgacgctgtcactccctgacagggtcagcttgtctacttggctattagtggaagtgcggatgctggaaagtgatcccaaggaagacaaatcagaaaggggccatgacaatgaactgctgccactggcctgtatacaagacacttactgctgagctgttcctactttggagactgaaagctttctgaagatcctgcttaaagttctgaactgctgcctgtcatcataagactgacgtcactgtcatcagttactacttgatgtgatggcttaattgcttaggagtttcataaaacacactatgctctctgtgtctgtttccgtgacttcacaagtgccgcttctatgattggaaggtaccacgtgccaacctccttccaactaacttactcatccttcacttctctgacttgctgtcatgtcctctggaaggccttccctgacatcacccctcactggctaggttacaagacactcctccgacttcccacagcttcctaggcttccttctgccactgcacatatcactcctatcttccttgctattcaaagaatgccttaacagtgaccttagtctatgtaattctagcactacagatgttcactaaaagtttgttaaatgactgaataaaaatgtaaatacaaaaacaggacaaaaattacatgctcgtttcaacagacacagaaaaaacatctcacaaatccaatacctttccatgataaaaacagtcaaagtagaacttcctcaggctgacaaaaggaacaaaaaacccagagctaacatcatacttaacagtgaaagactaaaaactttccccctgagatcaggaacaagacaaggatcctactctcaccatttctatccaacaatgtagtaaaattctagccagagcaaatagaagagataaatggtatccagactagaaaagaagtaaaactatctctatctgtagatgacttcatcttgtttataggaaatcctatggaatacatacacatgcaaactattagaaccaataaataagttcaccaaagttgcaggatacaagatcaatatatagaaatcaggactgggtgtggtggctcacgcctataatcccaactacttgagaggctgaggtgggaggatcgccagaggacaggagctcaagactggccagtgcaacacagcaagactgttcctaaaaagattaaaaattagctgggcatgatggtgtgtgcctgtagtttcagctactcaggaggctgaggtgggaggatcacttgagaccaggagcttgaggctgtagtgagctatgatcacaccactgcattccagcctggatgacagagcaacacttcttctcttcaaaaaaaaaaaaaaaaaaacacaaaaatcaattgtatttctttttgagatgaggtctcactctgtcacccaggtggactgtagtagtacaatcacagctcactgcagacttgacctcctgggctcaattggtcctcccacctccccaagtagctgggactacagattgcaccaccacacctggctaatttttatagagacgggctcttactatcttgctctgactggtctcaaactcctggatgcaagcgatcctcccacctcagcctcctaacgtgtgggaaatacaggcatgagccaccatgcctcgtcaccaatcatatctctatacactagcaataaacaacccaaaagttaagctaagaaaacatacattcatttataataccatcgaaaagaataaaatacttagaattgtatttagaataaaacacttaaaaacaaaataagtttaagatttgtatactaataactaactataaaccactgaaagaaattaaagacctaaataaatggtttaagtaaagaagacttcagtaaggtatcttcatggtcacagactggaagccttaatattgctgagatgacaatactccccaatttggtctatacagattcaactcaatccctataaaaatcccagctacatatttttttgcagaaattgacaagctgatcctgaaattcacatgggaatgcaaaggacccataactgccaaaacaattttgaaaaagaacaaatttggaggactcatacttcctaatttcaaaacttactacaggctgggcatggtggctcacacctgtaatcccagcactttgggaggctgagaaaggaggatcacctgaggtcaggagttcgagaccagcctagccaacatggtgaaacactgtctctactaaaaatacaaaaattagccaggcatagtggcaggtgcctgtaatctcagctacttgggagcctgaggcagaagaactgcttgaacccaggaggtggagattgcagtgagctgagatcctgccactgcactccagcctaggtgacagagcaagacactgtctcaaaaaaatatatatgtacacagctctgtaactgaagcaagtaaagaacttttcattaaagagagtgaagtttttaaatttctcatgctgctttttgaaagcaaaacagcttcttcactttattatcaacctccatgaaaatcttgttctaagtaccttttaacttacctagaatacaagaggcagagaacaaagacaaacagtccaataaaattatctgaatccagtaaagacccactctttgatggtggagtaggggtagggaccacagcagttgaatttccaggagccagggttggtgcagttatgcgtgtaataaagctcatcaggttgggattgcaggaacgatctgaaaatgagaaaatttgtattatccttggttacagctcatcttgttccaagaaagaacttgaggagttccctacatatcattcagtcatgatgtgaaacatgggaatgctttacttaaaaaatctgaaacttagcagtcagtagtaacacgtttggtcacaatcaatgacagaattaggaaaaaaaaagaaaacaacaacagaatctgtcaaatttcataaacatcattattgattttattggttttgtagtttgacaaatctttttaattctttaagtgtcaaggttttaagcacagaagtttatctctattttggtttttacatagttacttaagaacaaaatataagttatcattggtggaaggggggtctgcattgttttcctttaaaagaagcccatagaatatcctactgagaaacaatcctataataactacaaaaggagatttcctacagctgtttcttctacagcctgtgacatcaaactaaaattcagtcacaacaaagggccaaagcccttgaccacagctcttaactagtttgactcagcctaggttaggtaaagcctagaccatctaaaggactctgaccctttagactgtcagttataaatagctatcaatagatgtggggactaaaatgtgaaaggtaaatacctacaaacctacagtgaacactgtacgtttaagttttgtttgcttgtttcacatttgctctagctctagtttttgtaccaactatgtaaaggctgatttcctactttctttttatcaaatgaatgtgttattgacattcccttaccaggttcattggacatggctgaccaggtgaggtacatagtgtagagggtgatgagggaggactgcaagaggccggagcgaggctggtgttcctatggaatcaaaaggaaaacagtggcacagggactgccaagggctgactttccaaaatgcagtgcacttctctggagttaattcaactatcagtaactgagaactttcggattcttcttgagagttgaaaggtgacaagtaaccttctgttcagttagctcgcaaaagaacccagaaagaccaagcaagtactactggttctcaacgcatttcacaatcctagaaattcctgtgcatcacacaaggactttgattttccactcccttggtgtagtgaaaagatctaagatcagctctgcaactaattagtagctgggagaggcctatcacttctttgagacttctgttttctcacttttaaaaggaaaggtgatgtctagatagaattttcatatttcatatctataactccatgaatttttttaaacggtttttttttcttttttttctgagacggagtctcgcttttgtcaccccggctggagtgcagtggtgcgatctcagctcactgcaacctcctcctgggttcaaatttctccttgcctcagcctcctgagtagctgggattacagtgcccgccaccacacccggctaatttttgtacttttagtagagatggggtttcgtcatgttggccaagctggtcttgaactcctgacctcaggtgatctgcccgccttggcctcccaaagtgctgggattacaggcatgagccatcacgccaagctggagtttcgctcttattgcccaggctggagtgcaatggcgcaatctcagctcactgctacctccgcctccagggttcaggctattctcctgcccctcagcctgccaagtagctgggattacaggtgtgcgcccccacgcctagctaattttgtatttttagtagagatgacgtttcaccatgttggtcaggctggtcttgaactcctgacctcaagtgatccacccgccttggcctcccaaagtgctgggattacaggcgttaagccaccacacccagcctaaactatggtatttagaactcaagagcatgagttttgttttgaaatattaaaatcaattatttttcagtttaattcccctaaaatatcttggctaatgactcataagaatcattcccagccacatgcggtggctcacaactgtaaaaccagcactttgggaggctgagatgggtggatcacctgaggtcaggagttcgagaccagccttgccaacatggtgaaaccccgtctcaactaaaaatacaaaaattagccgggcatggtggcaggcgcctggccaaggctggagaatcactggaacccaggaggtggaggttgtagtgagctgagattgcaccatcgcactccagcctaggggacaagagtgagactttgtctcaaaaaaaaaaaaaaaaaaagactcattcccggccaggcgtggtggctcacgcctgtaatcccagcaccttgggaggccgaggcgggtggatcacgaggtcaagagttcagcctggccaagatggtgaaaccctatctctaccaaaaatacaaaaactggccaggcccggtggtggctgcctgtgatcccagctactcgggaggctgaggcagagaactgcttgaacccaggaggcagaggttgcagtgagccgagattgtgccactgcactccagcctggttgacagagcgagactccatctcaaaaaaaaaaaaaaaaaaaaaaaaaagcactataaattttcaagttacctgggtttttttttaatgatagtgaaattcatttaattatgatataggcatgaaatagaattatgaagactttataatatggaaaaatgttcaagtggataaacttagacataaattcataagaaagggtacctagattttaagcttagaattaaaaacctttcacaggagaaagaagtagtaaacaatcatacctgaatttttgggtggatcgatataatagaagccacaacgcaaaggatcaggttaatactgatgaagaacttgttttctgtgcagccatctggtttggtgtaatatgtatagagcagcccgacacagatgattgacaggatataaaaggcgcttgtgaaagacagtaaagctggagaaagggaaaccaatatgaatgaccacaactataataaactaataatgaaggccaattttcttccactccatataaaaatgaggagacattatgtcacttttctggggtaatttacagtaaaattacagaggtctcaaggttaaagtatcaagattgtattcaattggcttgatgttaaattccaaaatccaccaagcaactgaattcacttcctgaattacctgatttgatttcatgggttgattaccagacatttgatcattccagctagagtttactgctacctatatgttaattaatgtgtattgtgagcttttcttaggaacctaaatgattcctttaccctcaaaatgacccagttcacagcaagctccatgccaggatggtgttagaggaaaacagaatacacacactggtatctttttatgacagttttttcctctgcagccattggctatctaaatccatttcccatcacaaacaataagactgtccctgaactggaaaagtggctcatttgctattttttaatatctaaagtaatggtcttttccattcacactaaaaatcaacaattagctgtgttggctgaacatggtggctcatgcctgtaatcccagcactttgggaggccaaggtggctggattgcttgagcctgagttccagaccagcccaggcaacatggccaaaccctgtctctacaaaaaatacaaaaatcagccaggcatggtggcataaggctgtagccccagctacttgggaagctgaggcagggggattgcttgagcccaagacatagaggttgcagtgagccgagatggtgccactgcactccagcctggacaacagaacaaaaccccatctcaaacaacaaacaaaacaattagctgtgtagctctgaaaattagaaaacatgaaacagcacatacagtacactcagaccaactgcaagaatgatgagctcagctaacttgtattcaagtcaaagcccagattaagaaaactagtttctacttatctcaatgaattttgcatgtctaaaattaaatgatgtacattaagttactagcacacttaatgttttcacctctgaatatacaagatttttctacacttagttactgtaaagtatgaccaatttgcaactcaataaattcttctagagttgtatgatccaaaatgaattaaagaaaataacagccgggtgtggtggctcacgcctgcaatcctaacactttgggagggcaaggcaggtggatcgattgagtccaggagttccggcaacatggcaaaaccctgtctctacaaaaaacacaaaaattagccggtcgtggtggtgtaggcgtggtagtgtgggtgtggtggtgtgcacctgtagtcccagctacttgggaggctgaggtggatagcttgagccaggaaggcagaggttgcagtgagccatgattgtgccactgtactccagcctgggtgagagagtgagacccaatctcaaaaaaaaagaaaaaaaatagataaaaataaaattgtcattacaaacaatttaaatgaccaacactagggtaaaggttaaataaattatggtatactccgctatggaatgccatggaattgtatggaatggaataccatgcagcttacagtaaactccatgccaggagcttgaatgcaggttaaatgagtaagacatacctacactcactggtaaggaaggatattcatcatgtaggaagtgaaaagagcaagtcatggaacaacatacagtacaatcctgtttacatttaaatacaaaagcaaggtgaatgcataaatacataaaggttcacaagagtggctacatctggaaaggaaaatgggttgcagataggtggagatttgcatgttttagtctttataaagttctatcatttgtctttatggtaaacatagtatttttaaaaacatgtaaatattttaaaaaactaaatcaaatgaaaataaaactgcgcaattcaatagtatgtactgaaagcattttaaaatattcatacactttgactcttctatttctgggaatctgtcctaaggaaataatcagaaatgtgtgcaaatgtatattatgaagtagtaagtgctctaacatagccaaaatatattcgcaagctactgttaaatcccattatcactctagaaattgtaagtgcccctttcccaccagaaagtttttcatagcaggtatggggcccctctctgaataaggccataaggactactcactcctatctgcctaaagtaggtgggcagctgtcccatatgttgaacccatctgagtttcctctccatggaaacaaggttatcaaaaccagaactaagtcactaaatataactgtttttccttatctaaacacatgtaattaaattatgactctcaaaatacataaattgggaaaatcgaacaatttatattatctgtgctactttcttccagtgatgcatataattcagagccaaattctggaaattgtggatttttttccttttatttaatgttattattatttttagagacagggtcttgctctgtcacccaggctgcagtacagtggcatgatgatagcttactgcagccttgaactcctggattccagagattctcctgccttagcgtgctgagtagctaggactataggtatatgccaccatgcctggcaaattttttttttctaatgtaaagatggagtctcaatatgctgcctagactggtcttgaactcctggattcaagccattctcccaccttggacttctgtccctgaggactatagctgctgggactataatgatgatttttattgtacaccgtgcttaatgtagcagtatggctaacataggtgagtagagatacctaccagcataccacaaccttgggtttccttcttccattcgatttacccatgattcattccaagaatgagcaaaatctaccagcagcaccagctgaatgaggatgaagagggcggcccctatcatgccaacaacaaaccagactacaagaaccaagagaacaaagttattctctaccatagagtaacatttcagaagatccaacattctgaacggatttcaattaaaacaagacagaggtggtaaagacattctgtctccagcagtacagcaagattccaaactcaacggcattcttaaaagctttctactgggtttcagaccttttaaaatatgttttagcttgtgccaagggaagcctgggacctgagttccaaatgatactataagtcttttcttttaaatcacagtagaaatctaaagatgtcacctgatgccatgcttaggaagtaggttaagacagagataggggagcacaagagttgtaagtccttattttgacaggctctctgattagctttgtattccatcaagtgagaacacaaactattaagatattgccaaaagattaacatatggttccagaaaatctgagaggtgcagtgaatgcctcctgacctaaatccacatattaataatgagttgcagccgggcgtggtggctcacacctgtaatcccagcacttcaggaggctgaggcaggtggatcatgaggtcaagagttcaagaccagcctggccaagatggtgaaaccccgtctctgcctaaaatacaaaaattagctgggcgtggtggtgggcgcctgtaatcccagctactcgggagactgacgcagagaactgcttgaacccaggaggtggaggttgcagtgagctgagatcgtgccacggcactccagcctgggagacagagtgagactgtctaaaatatatatatatatatagtgagttgcaggtactaagtcatattaatcggataccatctcatttacttgtcagttctacaaaaacagtaattaaaaggtagttttgttttgttttgttttttgagacagagtcttgatctgtcgcccaggctggagtgcagtggcacgatcttggcacactgcaacctctgcctcccaggttcaggcaattttgctgcctcagccttctgagtacctggaatcacaggcgtgcaccaccacgcctggctaatttttgtatttttagtagagacagggcttcaccatattggccaggttggtctcaaactcctgacctcaggtgatccgcccgtcttggcctcccaaagtgctgagcttacaggtgtgagccactgcacccggcctaaaatgtagctttaactcaatcatctatagagtttatatagtttaaaattaaccccctcaatggtgaaccctacctgagctgaaatagcccccagggatgtagaaagagccaaccatgattccaataagggcagcaattttgaagaaccaaaacctattaaaatataaaaatgcatttatgaaatgctaagtttcacccttatactgagaaaaattcatttctgaaatgcaaaaataataacttaatagcttttttcccaacatgattgtctggactattttcttcatttgactattcatttaataggctaattcatttaatatttcacacaattaaaggacaacattagcctagaagataaatcactcacatttattaccagagaaaactgaaaatttagagtctccctacttttagcacttaaaggtaggcatttttctagcattctgggagttctaaaataacagtgttaggtacacacacagccattaactgttaaggtctggatgaaaagtaatcacaaatatttacaacacagggcacagataccttgcccacaatgacacagctcatcactggcacctgattttcagttcatgatctttaatgactgccttgtatggcagagtggaaagaaccaggctttggagctggacagatctaagtttcaatcttagctccaacctccaactggttaacaggtctcagacaatttattaacctctctgcagttcagttactacatctgtaaaaaggggattataatacacatcaagtttataaaacgccattcagtctttgagaattagaaatacggctgggcacagtggctcacgcctgtaagcccagcacttcaggaggcaaaggcgggcggaccacctgaggtcacgagttctagaccagcctggccaacacggtgaaaccccatctctactaaaaatacaaaaattagccaggcatggtggcaggtgcctataatgccagctactagggaggctgaggcaggagaatcacttgaacccgggagggggaggttgcagtgagccgagatcacgccattacactccagcctgggtgacaagagtgaaactccatctccaaaaacaaaacaaaaaaaaaaaaaaaaaaaggagagaattagaaacataggtaaaaggtggtcaggagtcagaagcaatagaatatgtaaatcagtagcacatatatattcactgacttttgtacactgtttaaatttatcaggtacatgtttatctttaaacaacagaaagaaaaaagtgtgtgtgtacgtagtatctagcatagtgcttcaactatttaacaggtgttcaataaaaatctaagaacatgaagcaaaggaatttaatagaagaaaataaaaagacaagaccccctatcccctccatgttacagcaatctaactgaaaatgacattaaaacaatttcacatgcataatagatcagaaatgcatctgagccactcatttacatattccattgatttcatcagaatggctatattaactgctgaagggaaggaagagccacaccataatgtaaccagttaatcataaatctaacatacccattgtgtactgccgctcggagatctttacttgtttttactttgaacatgagcagagaaaagacaaagaaaaagatggccatggcaaagctgatccgatacacagctttataaccaaccagcacatcacaatctttatctgcatttatatcagcctcatggattttaaatcccccttcacaaaatccaggaatctggaaaaaagcaatttcaatgttacgagaatatctacatttagacagagactctaacccactgcaggaaagcctggatttagaaaattaactacttcaacaactgcaagactgactatggaatttttctctttgtcttccaattcatttacaatcttgttaccaaacagtataaataacatgcattttaaaaataaaaatgctctctcggctgggcacggtggctcacatctgtaatcccagtattttgggggaccgaggtgggtggatcacgaggtcaggagttcgagaccaccctggccagcatggtgaaaaccctatctctactaaaaatacaaaaaattacccgggcatggtggtgcatgcttataatcccagctactcgggaggctgaggcaggagaattgcttgaaccagggaggcggaggttgcagtgagccaagatcatgtcactgcactccagcctgggcaacagagtgagtcttagtttcaaaaaaatatggtctctcttctttgcccttttaggatgaagaggctgtgtgccactttcctgtgagattttccagctacgactgagtccttccaaaggtgaagaactagtccagtttagatgcttcgacctttaacacataaggaaagaaaatgttttggagccacccttttaatgttttctctcagttgttcgactggagcccagatgttcattctgtatttctggaaaaggactaatgtcctcatatttctgtgttttgaccacacccccatataagtaaaaaatctccaaattacaaccaacttgattaacaacgacgaaataaaactagaattttgcagaatataaaaataaaaataaccaataccttaagggcactgttacttcttaccttcttcaagtaagtttccatctcttttctctgcatgatataggatacgacagtgctcaggaggagaatgaaagcataaatgaggcgagtcaccgtggaattcttactgttaggacagcaactacacagcaaacatgaggcaccgctgcagaggcatggaacctggaatgagcacaccatggtcacctgagaccgccttcagtatactcctttatgacacagatgtcgcagaagagaaagcgaggcaaatcaggctttatagttttaactcagagaatcatggctgggaggaagtggttaaaagtacgggctctggagtaaatattatttctgccgctttttaccccagcaagttacgtactctaaccccatttgaccatttgtaaaatgagctcaataatggaattttcctccctcagactctgctgtattaaatgagcactcaacactacctaaaatgcattaacagttcaataaatgttaattatattctgagagcatcatttgttttaaaatatgagaaaaatataaacctaactccacttgctgcttactgcgaatccaagttaccaaagctgatattacaacataaagcaacatgccgggcgtggtggctcacgcctgtaatcccagcactttgggaggccgaggcgggtggatcacaaggtcaggagatcgagaccatcctggctaacacggtgaaaccctgtctctactaaaaatacagaaaaaattagccgggtgtggtggcggacgcctgtagtcccagctactcaggaggctgaggcaggagaatggcatgaacccaggaggcggagctcacactgagctgagattgcgccactgcactccagcctgggctacagagcgagactccatctcaaaaaaataaaataaaataaaaaaataaagcaacactacatggaaaccctctgacaaataataacagcaagggccatttagctcaattcaagaggaaccaggttcctcagaaagttaaatacagaatgaccatatgacccagaaagtatatacccgaccccaatagctgttttgtttgaaactgctattaaaacaaaagcttgtacacgaatattcacagcaccactatttacaatcaccaaaatgtggaaacaacccactgtccattaattgataagtaaatatggcctaagtaaaaatatggtatatctggctgggtgcggcagctcacacctgtaatcccagcactttgggaggctgaggtgggcaggtcacctgaggtcaggagttcaagaccagcctggccaacatgatgaaatcccatctctactaaaaatacaaaaattatccgggcgtggtggctcatgcctgtggccccaactactcaggaggctgaggcaggagaattgcttgaacccaggaggtggaggttgcattgagctgaaatcatgccactgcactccagcctgggcaacagagtgagacttggtctatctatacaatggcttattcagacataatagatagatacatgatagaacacaggtgaaccctgaaaacatcatgcaaagttatttaaaaagccagacatgaaaggtcacatactgtattagtgcatttatataataaaatatccagaataagtgaatctagagacagaagattaggggttgaagggaagggaaatgggagtgatggtttaatgggtaaaggatttccctttagggcgacgaactagacagatgtgatggcagcaaaacattgtgaatgtactaaatgccactatacgcttttttatttttttttttttgagacagtctcactctgttgcccaggctggagtgcagtggcacaatctcggctcacggcaacctccacctcctgagttcaagcaattcttgtgctttagcctcccaagtagctgggactacaggtgtgcaatgccacccccagctgatttttttttgtattttttagtagagacagggttttgtcatgttgcccaggctggtcttgaattcctgagctcaggcaatccacccacactggccaccgaaagtgctggattacaggcgtgagatactgcacccggcccactaaacattttgaaatggttaattttatgtcaactttacctccttttttttaaagagtaacctagggccaggcgtggtggctcacgcctgtaatcccagcactttgggaggccaaggcaggtggaccacaaggtcaggagttcaagaccagcctggccaagatggtgaaaccccatctctactaaaaatacaaaaattagccgggtgcagtggcaggcacctgtaatcccagctactcaggaggctgaggcaggagaactgcttgaacccgggtggccaaggttgcagtgagccaagattgtgccactgcactccagcctgggcgacagactgagactccgtctcaaaaaaaaagagtaacctagatctttagtctgctaaaatctgttagtgaccacactacatgaaagaagatataattttatttctttttttcttttctttctttttttttgagacaggttctcactctgtctcccaggctggagtgcagtaacgccatctcggctcactgcaacctcaccctcctgggatcaagcaattctacctcagcctcccaagtagctgggattacagggattacagacacgtgccaccatgctcagctaatttttgtgtaaagacagggtttcaccatgttggccaggctggtctcgaattcctgacctcaagtgatctgcccgcctccgcctcccaaagggctgggattacatgcatgagccaatgcacccggcctttgttttgttttgttttaaaaagacaaggcgtcactctgttgcccaagctggagtacagttgtgtgatcacagctcactgcagcatcaaactcctgggctcaagcgatcctctggcctcagcctcctgagtacaagcaagcaccaccatgcccagctaagagaggatataatttgagtcattatgcttgattaggaaactgcttgaaattgctctgagggggtgacattatcaagtcatattacaaggacaagctaattcagaattagcagaagtaaacaatggataactctggtcttaaaatatggtcccaggaataatcttcatttttttatagatggtatcttgtgtgcactttatgataattttgtgtggtttgcagcagggtgctaacattctaaaaaagttcagttttctcatctgtaaaaatgagcataataccacctactcgaacagggtgattgagcaaagaatgagatgatgtcaggaatataaagaacctagtataatgcctgacatatttatcaggctcaatatatcgtggtagccattattatttgtaattgcaatagcaatgggaaattgaccagccagtctcagtctccaattcttaactacagtataggccaaacactgcagaggcatgtcctccacaaattcttatgttgaagtcctaatgcccaattcctcaaaatgtatccttacttggtcactgcagatgtagtaagttaagatgaggttatatggagtagagtgagcagctaattcaatataactgtgtccttataaaaaggggaaacttggacaaaggcttacaacacagggagaattccacatgccatgtgaaggcagagatctacaagccaaggaacatcaaagactgccagcaaaccaaaaaaaaaaaaagccaggggagaggcatgatacagattctctctcaccacccttagaaggaaccaaccctgctgacaccttcatcccagacttccagcctctagaattcagagataagaaatcactgggtttaagccactcggtctgtggtactttgttataaagccctggcaaactaataaacttacttacctatagttgtcttaagaatgtaaatatctcgaaggggagactatctttacaacgttatatcttttgtatctttacagagcaggtactcagtaaatatctgtgggacaaatctgtcctactatatgttatgtcatttttctatttcagtaaatgacaactccattcttcctgttgcttgggcccaaaacctggagtcatcccgaatgccttcccttttcccaaaatcctcatccaatctgtcagtacatcagctctacccttaaaatatatccagaatctgaccattttcacagtatccttagctatcacctttgtccaagccacaactatcatctctcatctggattaagcgcaaaagttcccatctcacagctgtagcgacccattcagaagctctgagttggccggcacagtggctcacgcctgtaatcccagcactttgggaagccaaggcaggcagatcacctgaggtcaggagttcaagacccgccaggccaacacagtgaaatcctgtctctactaaaaatgcaaaattagcctcaaaaaaaaaaaaaaaaaaaaaagaagccctgaattgttataaagattattttaagcttttaagctgaagcatctgagcttcaacagatgcagaggaaaaaaaaaagccttctgggagcttctcttatctgactaaaagcagcaacttctgggaaacgaggctgccataaagtccctctccagggcagttttaagatcatgaagaagctggaaagacccaccatacctgcataaacaagtactaccacaaacgtatttcctatttattctcctaaaaaaacttgtctttcctaaagaaacctatttgttcttctcatagaagcctttctcccagcttcctttttcctactaaattagaaagccttggctgggtgcagtggctcacacctgtaatcccagcactttgggaagctgaggtgggcagatcacctgaggtcgggagttcaagaccggcctgaccaacatggagaaaccccatctctactaaaaatacaaaattagccaggcgtggtggcacatgcctgtaatcccagctacttgggaggctgaggcaggagaatcgcttgaacctgggaggtggagattgcagtgagccaagatcccaccattgcactccagcctgggcaacaagagtggaacttgttttctcaaaaacgaaaaaaaaaaaaaaagcctcaagttctaaccgccccctttgagttactattactgagcactcctgtgtgtacatgtcttgcatgcataaactctaaataatctgttttgtcagtttaattcacaagcccccagaaacagaacccaaaaggctggaggaagattcttcccagcctacactgctttacctttacttttctaccatctattctccacacagcaaccagaaaccacctcgttaaaacacaggcccagatcacatcactccttttttcaaactctgtaatagattcccatataacttaagagtaaaagccgggcaagacgcggtggctcacacctgtaatccaagcactctgggaggccggcggatcacgaggtcaggagattgagaccatcctggcgtgagccaccatgcctggccttcaactcaccaggattttctaatgtgatagaagataaaagaaaaattgtacagtaaacgattatttcataaaactttgtctctatatgggtgcatcagatcacagatcaactatgtacaatctttctttaggtcaaggtcagaataattagaaaaccactgctctcaagaaagcccttaaaaatggaacactcttttgatttaggaccaacaaccttaaaatacattctgttcctaagaaatagtggaatgaagccaggcatggtgtcacacacctgtactgggaaggctgaggtgggaggatcacttgaatccaggagttcaaggctgcagtgagctatgactgagccactgcactccagcctgggtgacagagcaaaactctgtccccctccaaaaaaaaaaaagaaaaatagtagaaagagctgaaacagaatccttggtgtaatactgtcaaatatatgtatgtttggttcccatttcctggcatacaatttctaaaatccttggaataaccagcgtctttttgtatgctaatgagatgactggtgactggcagcccctaggtggcttcatgatgggtgagggtcatagtaggaggttgggacttttcagtctcacccctgaccctccaaggaggggctgaaggttaggtcagtaaccaaaagccaatgatttaatgaatgctgactacataatgaagcctgcataaaagctcagaaggacaaagttcagaagaacttttggctgggcatggtggctcacaccccaggagttcgagaccagcctggccaacatggcgaaatcccgtctttattgaaaatacaaaaattagctgggcgtggtggcatacactataatcccagctactccgggaggctgaaacatgagaatcccttggaggttgaagagagccgagatggcgccactgccccagacagagcatggaagctccagacccgttccctctacaccttgtcttacatatcacttcatctgtatctttaaaaatatattaatagtagccataaaaaaagaagaaaatcatgtcctttgcagcaacaaagatgcagctggaggccactatcccaagtgaattaatacagaaacagaaaaccaaatacagcatattctcgcttacaagtgggagctaaacactgggaacacagacacgaagatggcaacaataaacactggagagtccaagagtggggaaggacggtggggggataggggttgaaaaactacctgttggatactgtgttcactgtttgggcaacggaatcattagaaacccaaacctcacgataaggcaatatacccatgtaacaaaactgcatatgtaccctctgaatctaaaattaaaaatacataaatacacaaaataaaatacttttataataaaccagtaaacatgtttccttgagttttgtgaccaaattaatcaaagccaaggagggaggtcacgggaactttgatttataggtggccggtcagaagcacaggtaaaacaacctgaggcttgccattggcacagaaagtgggcacagtcttgtgagactgagccctccacttgtgtgatttgatgctatctccaagtagagagcttcggaattgacttgtagggcaccaagttggcatcccctgcagagctgactgtttgcctgatgtttgggggaaaatccccacacaccacacatcaggtgtcaaaagtgtgttgtgagtacagcaggagaaactgagtgtgctttttctacacacttggtcaattaaatcagctggagaatgaggaatcaaggaatcacgctcctctgaagtgggtaaatgagggaactcagcatattcttttataggccctataattttctctttaaaatgtttacagtttacaaggtgattaaaccttcacttcactgtcacaatcgttctcgaagagaggaatgctggggtgattatcctcggataaatgacttacagcagtcccaaaatattcaggccctggtttccaattttgaataacaatccacaagggcttctttcccttgcacctgaactgcagacaagcctccgctaaaaccccagctttgccacacactctgtagttttggcaaatcccgtgctaggggataaaaatattacttgagccacctagaactaaatgatggcaccttaagaggtgcttcgggaggaaccggagcccctcgctgggagctgtcattccttggtccctctccagctccagaggaacctagtcaggaagcctcgcagggcggagccatccgaattgtaaacaatggcggcctagcctcttccgttccccgaggaacccggagggcgagccgcctaagctggacctgagggtatcgcggatttgcgtctggggccccggagaccctctgtagcccagggcctgctgacatcccgagagcctctggagccaaggcccgtgcagctctggtctcgaggcctttccccgcaaaccgcaggtccggcgaggactcgggaccccgaactcacccagctggcgagggagaagacacccagcacagcccccatggtgacgccagtgatggaggtggccggtcctgaggctgctttctaacacggtggtaactgccagctgaggtgactccccagaaacatgacggtttctcaggccggaaacgcagccttccacagacgcacggatgcgtcacggcgtggccccgcccaccgtccgcgaccggagcggcagaggggggcgcctgtcattggctgagggggaaggtggggctaaaccatcctggggttgcaggaactgtgaaggtgtcattccttacatcatttgtattcattgtgcaaagatctggaagttacagaagtgtacagagaggcacagtacgctcagaatttattctctagttaataggagatctgacaacataaatgcaccgtgccccaatgtaatgaatacgatgaagtagtatgggggaataggctttcaataaaggtgtatttagtgcctcctattgtaaggggaaagtaatttagctgggcagtagtcttggaaggcttctctgaaggatttattttttaatctgcgaactaaaggatgagtccaaattaacctagaaacgatggaaatcgtatcctaaaatgtgggatgcaccccatttgggaaaaatgaatggctctaagggtgcatgaaggacattaagcgatattaaacagcagagtgagaacgtcccatttcaaaccaacaggctagttgtttgaggccagtatggtatttaacatttttctagtatttatctccctttctaacagagtaaagccttcattttccagatctctcaaacaggcaaccatgcctgcagttttaaaatattgttttgttttgaggtgtgtgttagcaataaccttttcatttcttccgagcaatgctgatttcccatttaagcagtgatgtaaatattcctttcaaaatacatgtcaaatttgagagttcacttaaagaagaaaatgaaaacattttttacttacacatataatagtttaggtggaatgtggcaaacaatgatgatgtccggacaacaaggtgtcacacttcaatatcttctcctgtggtgtgttaatcttccctgatagataaaactctctggaaggggattcataattgaattccttctggattgtcagcctttagtctgataagggaaattcatgaaaagcccctctctccatgtgctgttccccaagcaatcatcataccagtgtggcatatttggggatgttatttcctggattccttgaaaatgtattccaaattcatcttttacagaaatggaatgaggctcaaagtttgcccaaggccatgaaaagggctgatgaaagaagaaagagaactactcacatttaataattcctacctctcttttcccagatccctctcctcaccacacatacacaaataccagctcaagtcaagttgcttcaggaccactgaactttccaggtagtccttaacattcttgcttcttcctgtctgagtattgctggtctggacttaagagagctgactgtgataaattttacagatcgaattctaccagaaacatacctgtagtcaaaaagaattaggtttatttagcttgttcagaaagggagaacacatatcagagaaaatataaggtgtcttggtaagaggtgactggggagaacttattttaggatttgggtttatgctgggtaactaaatctaaggagagtttaaggaggaggagaacagttttggattggacacagtcaaggagtagaggcaattcagtgattaggtatcttacaaatttttatccagaaggaagaaggattaaaacaaggctagattagtccttggaaaagtgtgataccctaccttgtcttaacctgaattgactctctcttagctgagggagacagacaaactccattttggctccttcacttgccgctccttacccatcccacttcctcaaggatttaacttgtgcaagctgactcccagcacatcaaagaatgcaattaactgataagatactgtggcaagcgatagctgcagtttccaggaattcacccggttgatagtaccctaagcccctgcatttttgtccggttgatggtacccaaagcccccacatctatcaccttgtgatggatttaaagcccctgcacctggaactatttgttttcctgtaaccatttgtctttttaacttttttgcctgttttacttctgtaagattgcctcagctaggctccccctcccctttctaaaccaaagtataaaagaaaatctagccccttcttcggggccgagagaattttaagcactagccatctctcagttgccggctaataaaggactcctgaattcgtctcagagtgtggcgtttctctataattcgctcggttacaaaaaaagaagcaaaatccactcatttattagtcagaattggaagatgttgagtcctatctgcggtaccagagtggctttgtctgtatcttgatccaactacatggtggtcttgtctgatctttgtttatattctgtgatcactgtttttgttcagttagaaacattaggtctagctgtcagctgaacagtttttcattttcttacctgtaagcatttgtcctcccacatgtaggatccccccatctcttagtgtttctggccctaactggttgagtgtgtcacttctacttggccaaagcgaggacagcagatctttgtgatcatctactccaatttcccgcctcaggcagaaaccccttagcaacatctcttctagggtagggggctcactgccacccaaggcagctcctcccatctttacacatccattgtcaaacctgtcaggcctctgagcccaagctaagccatcataaccccgtgaccttcacatacacatccagatggcctgttcctgccttaactgatgacattccaccacgaaagaagtgaaaatgccctgttcctgccttaactgatgacattaccttgtgaaattccttctcctggctcatcctggctcaaaagctcccccactgagcaccttgtgacccccgcccctgaccatcagagaacaaccctctttgactgtaactttcctttacctacccaaatcctataaaacggccccacccctatctcccttcgctgactctcttttcggactcagcccgcctgcacccaggtgaaataaacagccctgttgctcacacaaagcctgtttggtggtctcttcacacggacgcgagtaaaaaaacctaggttatttccccccatatgttgttgaaaagataacacatgtacttggttataacatactgcataaaggagcacacggtgaaaatgaagtgtccttcccacccttcccccacccccatctcccagatctcctttcagagttcctacaggaatatgcatatgccagcattatggcacttttttttttttttttttttttgagacagagtctcgctctgtcgcccaggctggagtgcagtggcacaatcttggctcactgcaacgtccgcctcctgagttcaagcgattctcctgcctcagcctcctgagtagctaggattacaggtgcccaccaccatgcctggctaatttttttttgtatttatagtagagacagggtttcaccatgttggccaggctcgtcttgaactcctgacctcaggtgatccacccgccgcttttttttcacttaacttattagttcattcgataaatatttaccatgctattactatgtgtcaggcactgttgccagtgataagaaaatagtagagaacaaaacaaagtgcccacccttaaaagaccttatgctgtagggaaaaaagacaagcagcaaacacacacgtatataatataacactcagacactgacaagagctgtgaaaaaagagaaaggagaatacagagttggtgggggtccattattttcttttcttttatttatttatttttttttttttgagacagggtctcactctgtcacccaggctggagtgcagtggcatgatctcacctcgctgcaacctcagcctcttgggttgaagcaatactcatgcttcagcctccccagtagctggaattacaggcacataccaccatgcctggccaatttttgtatttttagtagagacagggtttcgccatgttagccaggctggtcttgaacacctgacctcaagtgatccgcgcacctaggcctcccaaagtgctgggattacaggaacgagccactgcgcccggccctactattttcaagagtagtctgggcaggtcttttagagggcttgacactggagcacagacatgagggaaccgaggaagcaagccataaagatacctggaggaagagcaggagaaaatgccctgagatgaaagcatgctttaaggcaggaaaacagagtctggagtcggggaacaaaaggctgattcacacttcagctatgacaggaaatatcctctccatagggtgtaggccaagtaaatgactttgtaactttacttcatccttttcatttacatagggcgtgtcccaagtagagggtatttaaactcccaaaaattctgtaacaggggcccttgagctcctatgcttgggccccctcccacactgcggagtgaattggtgagatggagtcttgctctgtggcccgggctggagtacactggctcaaactcggctcactgcaacctccacctcccaggttcaagcaattctcctgcctcagcctcctgagtagctaggattacaggtgtgcaccaccatgcccagccactttttgtatttttagtggagacggggtttcaccatgttggccaggctggtctcgaactcctgacctcgtgatccgcgcgcctcggcctcccaaagtgctgggattacaggcgtgaaccaccgcgcccagcccatactttcattttcaataaattccttcattccttcttgctttgtgtgttgtgtccaattctttgttcaagatgccaagaacctggacaccctccaatggtgacagctgagagggaaaatggtgagagatgaggctggacaagtattcagggggcagttcacttccagccttgttgatggtgacaacaactctacatcttattctaaatgtaatggggaaacagttgaaagcttttgagcaggtgagggacatggtcatgcttacttttttttttttaagctggagtttcaaaaaaaagccttcagccaccgcgccaatcatgtttacattttattttatttattgttttgagacggagtctcactctgtcaccaggctggagtgcagtggcgtgatctcggctcactgcaacctcggcctcccaggttcaagcaattctcctgcctcagcctcccgagtagctggactacaggcgcacgccaccacgcccagctaatttttgtatttttagtggagacatggtttcactatgttggccaggatggtcttgtactcttgacctcgtgatccacgtgccttggcctcccaaagtgttgggattacaggcataagccactgcgcccggccgtgtttacctttcaaaaggatcattctggctgctggttggaataaagactggagcagggatgggttagggttgagggttatagtagaagcaatggcgggactagttcggagactgttgccgtatacatagctgaaactgcctttgcaaaattatgacggagacagtgaaaaagatctaacttcatcttcgttctaacctttaacctgtccttgttccttcctgggtgtaggctgaactaactttgggaggaacttagtttatagtttaaaacaaagatgataacagccccttcccaaaacaaaccttcctcttgcctgggtactagactgcctttgtaggactaacaaattagccacaagattagaaattatggcttaggagtcatgcagctggaggctacaagattctgaccctccctgaacttctgctaagatcagcgcttgagatattttccagaccctgaacttgatggatcagctggcaccacacagattgataaagtggctcatctgatcttgtggcccgcacccaggaactcagtgcaagaggacagcttcagcttcccatgatttcatctcctacctgaccaatcagcactccttgctcactggcttccccccacccaccaagttaaccttaaaaactctgatccccagcctggagcggtggctcatgcctgtaatcctggtaccttgggaggctgaggcgggtggatcacttgaggccaggagttctagtccagcctggccaatatggtgaaacccccgtctgtactaaaaaaaatacaaaaaattagccaggcatggtggtgcatgccttgtagtcccagctactctggagactgaggcaggagaatcacttgaactggggaggcagaggctgcagggagtggagattgtgccattgcactccagcctgggcaacagactccgtctcaaaacaaacaaacaaacaaacaaaaaactctgatccccaaatgctcagggaggctgatttgagcaataataaagctccggtctcccacacagccggctctgtgtgaattactctttctctgttgcaactcccctgtcttgataagtcagctctgtctaggtagcaggcgaggtaaaccccctggctggttacacagcttgaagacagctctgtatctaaactgtatctacgtctatatctaccttggtccctcttaattcttgctacggtaatctattttattttatggatgtatcataatttatttcctcagttccctaaggatagactttttttttcgtttgagacagagtctcgctctgtcgtccaggctggggtgcaggggcgtgatctccgctcactgcagcctctgcctctcgggtttaagcaattctcctgcctcagcctcccaagtagctgggactacaggagcgcgctgccacgtctggctaatttttgtatttttagtagagatggtgtttcaccacgttggccaggacggtcttggtctcctgacctcatgatccgcctgcctcggcctcccaaagtgctgggattacaggcgtgagccaccgtggctggcttttttttttttttttgagacagggtgtccctctgtcactcaggctggagtgcaatggcacagtctctgctgacttcaacctccgcctgtcgggctcaagggatcctcccacctcagcctcctgagtagctgggactacatacaggtgcacaccaccacacctggctaattttttaattttttgtagaagtgaggtctcactatgttgcccaggctggtcttgaactcctgggctcaagcaatctgcctgcctcagcctaccaaagtgctggactgcccaaggggttcaccttgcacgctgcctagacagagctgattaatcaagaagggggaattgcgacagagaaagtaattcacacaaagcctgctgtgcgggagcccagagttttgttattactcaaatcatcctcccgaaaactcaaggatcagagtttttaaggataatttggtgggtagggggccaatgaattgggagtgctgattgcttggctgggggatgaaattgcagagagtcgctgggcgcggtggctcatgcctgtaatcccagcactttgggaggccgaggcgggtggatcacgaggtcaggagatggagaccatcctggctaacacggtgaaacctcatctctactaaaaatacaaaaaaactagctgggcgtggtggcgggtgcctgtagtcccagctactcgggaggctgaggcaagagaatggcgtgaccccaggaggtggagcttgcagtgagccaagatcgcgccactgcactccagcctgggtgacagagcgagattccttctcaaaaaaacaaaacaaacaaacaaaaaaaccagaaattgcagagagtcaaagctgttttcttctgctgagtcagttcctggatgagggccacagaactggttggcaggtccagtggggccatctggttgttagaaatgcaaaaacctgaaaagacatctcaaaaggctgatcttaggttcacaatagcgattttacctcaagagtaattgggggccaggcacagtggcttacgtctgtgatcccagcactttgggaagctgaggcaggcagatcacttgaggtcaggagttcaagaccagcctggccaacatggcaaaaccccgtctctactaaaaatacaaaaattagctggcgtggtggcaggtccctgtaatcccagctactgtggaggctgaggcatgataattgcttgaacctgtgaggcagaggttgcaataagccaagattgtgccactgcactccagcctgggtgacagagcaagactctgtctcaaaaaaacaaaacaaaaaaatcttatgacctctagaataagaataatggtgggtactatttagaactccagcccttctcatcttggcttggtggctggtggcctgtggcctttcatttgttttacaagaacagtttagctttctggaaagggctattgtttaaatgatacactaaattccttcccaaggctagtttggcctggcttggcatggtggctcacacctacaatcccagcactttgggaggccgaggcgggaggatcacctgaccaacatggagaaaccctgtctctactaaaaatacaaaaaattagctgggcgtggtggtgcatgcctgtaatcccagctactcaggaggctgaggcaggagaatcacttgaactcaggaggcggacattgtggtgagccaagttggcgccattgcactccagcctgggcaacaagagcgaaactccgtctcaaaaaaaaaaacaaaaaacaaaaaaacaaaaaaaactggtttagcctatacccaggaatgaacaggacactttagaggttagaagcaagatggggtcagttaggtctgatatctcagttatgattttttgcaaaggtggtttcaggatgacaggtgtgagccattgcgcccagcccctgatagatatttagactggtcgcaacccttttgcttttacaaaaatgaattaatgaatatatcctttgtgctcaggtttcagcatatctgcagagttattccaagaagtgtagttgctagacacaaggaaaaataaattattcctcatattgaaattaaatctggtgatctaattctccatcaaagaaaccaatttattcactctttgccacaccaccccttcagagactataaaagagaggaatctgccacccttcccacatcagttttcttgtctttaaatattcccagtcttggcagggagtggtggctcacgcctgtaatcccaccatgctggtaggcccaggcggatggatcagctgaggtcggagttcgagaccagcctggtcaacatggcgaaacctcgtctctactaaaaatacaaaaattagccaggcgtggtggcaccttccggtaatcccagctactcgggaggctgaggcatgagaatcgctcaaacccagggggcagaggttgcagtgaaccgagattgcgccactgcactccagcctgggcgacagagtgagattctgtctcaaaacaaaaacaaaaacaaaataacaaaaacccagtctaccaagccaccacctgaggccctgtctcctcctcgcacggtccccatttgaggttacagagagataaactgaggcacaagcagcacccgcggcccaagacctccccttggcctcactgtccccctttccgtatcttccccgggccaagttccaacccggatccctccttcgcagctcagccctcgactcccacttcgtccctcctctgccccctccgcggctgcggaaggggacgcgaaccgtcctggtcccatccgagccgccgtagcgcgagtgccgcgggagttcggcagcccaggtcgccaaggcaacgggctccgctgcgggttgcgggctgcgggcgctaggctgccccggggaggcgctgcggaccggcggcccaggcacggagaggcggcgagaccgcaggtgagcaggagccgggcggccggttgcggccccaacgctccgggcctggcgtcgacacgtcgcagggggcgaggggctgagccgccggggatcccggggagggaggctgcggcccgatctttgtccctcagccgcgccggggacggcgcccccgacgccctttgaccccgccccgcgttcagggagagtccgttttcggctgtttattatatttgtagccattggtcgacctcattcgaaagtttcttaaaaaaaaaatcccttcttgtttgggggccagaaaataactcaaaactgtgcagaaaatttatttgtgtgtgtgactcttctggggccagagaggattgacttctttgtgcgtcagttttatcgtctgcaaaatgggaatcatggtagcacctgtctgatgacgttattacaaggtaaatttatatttaaaattcgtggaggtaagccctcaatacatgggagcttttattattactactactacaaggaggaccatcactgagcatttattgtgagccacggcccgggctgatagccagggtaaaaaagtgaacgagagacatcgtgtcctgagggaactccacagttttccggaggagacagactcgtaaacaagaattcacagtgattccggttatgattttggacatacaggggggctgtgaatgcacagagaaaacagttaacctggatttctggaggtgaggttagtgtggatgatcagggagagatgccaaaagaaggtgacttccaaaatgagacatgaaggctgtctttatgttggccagaagatgaggctggtggagtgtaccttgctgtgggtagataaagcaggtagagaaagtaggtagagaaaagccttggggagagagtgcagacttcttgggaatctgcaaggatttcaggctagctggagagcagattatgagagttggagggggtctggctagatggtgtttgagagacaagcaggtgctcctcctgaaagactgtaagtgtggaggagtttgggctttgtgttgggggcagtgggaagccatcaaagggttttaagccggaggtgtgtgtctttgatcagaggtatagtttcagaaagatcagttttttgtgtttctctcttggtcttatcattcctcccatctgtttttcactttgcaggcattcatttgtggtgattcatatatatgtgtgtgtgtgacagtgtgtgcgtgtatgtatttattgttgagatgaggtctcactatgttgcccaggctggtctcagattcctgggctcaagtgatcctcctgtctcagcctcccaagcagctgggactgcaggtgcacaccactgcacctggctaattcaaaaaatatttaatgagcatcttcttctatgtgcaaggcactgtgtaggtagtaaggaagcaggtccctgccctcaaggagatcacagattggtggagaaaatattcatcaaacaagtgattataattgtgatgagaattgtgaaagggggcgcatgttaagatcaatctagcatagtttggagattcaggtagagttttgataaaatgtatggagggtgtagtctgagttagctatcgtggggatgttccaaacattttcaaaagtacattcatggagccaaaagcagtccactacaactggaacttaaagatcaatattgaaagagatccatccagagaggttgacaaaaaaaaaaaggctgagattattcagggctactgcattgcatactcttggaagaatgagccatgcacttagtctacactaaaagaaatggctagagaaacaggaacaggagagaaaccagcaaagtatagtaatgaaggccaaagggagaggttggttggcctttgtagatgttgctgagatgtcgagtaatacaagttaaaaattaaaatgtgtccttttgggtaaataaatatggaggtcggttgggacctcattgagcagatttggtgaaatggttggggcggaatctataatatcagcagctttcaaaggttcaatataatatatcagtgggatgagttaagagtgggatgtgagaaagacaaagtgtaggcagctcagagaagtttggctgcgaagggaggtagagagaaggctgaggagcgattggggaataggtgaagtttttttgagcatgagagagattaaatgctgttggcaaagagccagtggagagagagaaaggctgagaagacacaggatatgaaagggagaattgatagtataactttcctgagaaggtgggagtggaggagctccacagtacagatccttcaataggagtctgatgcctgttactttttggagacgtgggaagccaggttattcctgaaaggagtgcaccagtgtaatgcaacaaaaataaataaaggtataagtgtggaaggaaagtcacaattttcattgtcggcagatagcaggcatttattgaactagtattgtgttaagtacttttcatgcaccattcttttttttttttttgggacagggtatcactctgtcgcccatgctggagtgtagtggtgcaatcttggctcactgcagcctctgcctcctgtgctcaagcgatccacctgcctcagccccccaagtagctgggaatacaggtgcgagccaccacactcagctaatttttgtatttttagtagagatgaggttttgccatgttgaccaggctggtctcgaactccagacctcaagtgatccacccgcatcggcctcccaagatgctaggattacaggcatgagccactgcgcccggcctcatgcaccgttcttaatgaataatgtgatgtttacaacaaccctgtgagataggccctctaataattgcaaatttatggataaagaaactgaggtaacatgctcactcagggtcacacagtatttgaatctaggtttacctgaacccagagcttttactcttaaccactacctggatgatataaatctctacctgtgatatgattgtctgctgagaaaattcaagagaattaaactaaaaatacttagatataataaggctaagtgaacagcagttataagatagacaaaaagcaatagctttatgcaaacaaaaatagaaaatgtaattgtaggagaactgacaatagcaacatgaaaaataaatacttagaaataaacttaaaaatacatgtacccagcttagccacacagagtaagagttggctgggcatggggatgggatgacaggatgagtaaggtaaagtagttttcccatgggaacatcagagtattgatactggagaaggggtaggttaaaaaaaaaacaggtgtctatcataagacatcatgagatattgactatcatgtttttataaaattgaaaaattggcctggcacggtggcttacgcctgtaatcccagcactttgggaggccaaggcgggcagattatctgaggtgaggagtttgagactagcctggtcaacatggtgaaaccccatctctgctaaaaatacaaaaattagctgggtgtagtggtgcacgcctgtagtcccagctacttgggaaactgaggcaggagattctcttcaacctgggaggcagaggttgcagtgagctgagattgtaccattgcactccagcctgggtgacaagagcaaaactccatctcaaaaaaaaggacagttaggtgggagctatatatattagaaagatgtttacattatgtggttaggtgtaaaaagcagattacggtacagtatgttactgttttcttaaatgtatacatgtttataataaaaatgtctggaaatactagttctttttaaaaatgttaaatctttaattgtgataaaatttaccatcttaacgatttttaagtttacagttttgtagtattaagtgtattcatgctgtgcaaccaatctgcatgactttttcatcttgcaaaagtgcaaaagccaaactatacctttaataggtttagctccccatttccgcctccccaccagcccttggcagcacccattctacttttgttttctatgtgtttggttactctggatacatcgtgttagtggaatcttgcattatttgtctttctgtgacgggcttatttcactagcatagtgtcctcaaggttcatccttgttgtgtagcatgtgtcagaatttcattctttttgtaaggctgaataatattccattgcatgtttataccgcactttgtttatccattcatcgatggtcactttgagttgcttccatcttttggctattgtgaataatactgcagtgaaacataagtgtactagaaaggtaagctgtttatgagatcatggggaaacttttattctgttcctcattgccctaattttccttttttatgagcatgaattgccttcataatcagaaaaaaaatgaggaagtatcttctttaggaggctggggaaataagggtaaaaaagggcagtggcagcggaaagggaaaggagagggcagatttgagagacatttcagaaggagaatcaacaggacttgaccaacaagaggtaagggagagaggagtggaagatgaagctttcctggcctctggtgggaaggggcatcagtcctggtggggctttgactaggggaggagggaggaaataaggctggagagccacccaagcctttgtttagcagtttggacttctagaaggtggagagaaaccattgaaaggaagtgaaatgacttgatctgatttgcacatagagagatgacactggctctttccaaccattctttaaactgaaggcagatagtgccaggtatccctttgtgttgcttatacttgaacttctgttaatttccttttatttgagatgaacctttagtactgaagtacacatatctattattctaaaagcacctggaatattttaaacaatgttttagtgtgtgtttttttgttttttgtttttttgtgtgtgttttttgagacggagtctcgctctgttgtgcaggctggagtgcaatggcaccatctcagttcactgcagcctccgcctcccaggttcaagcaattctcctgcctcagcctcccaagtagctgggattacaagcacttgccattatgcccggctaatttttgtattattattattttttttgagatggagtttcactcttatcgcccaggctggagtacaatggtacgatcttggctcaccgcaactgccacctcctgggttcaagcgattctcatgcctcagcctcctgagtagctgggattacaggcacgcgccaccacgcccggctaattttgtatttttagtagagacagcattctccatgttggtcaggctggtcttgaactcccaacctcaggtgatccactcgccttggcctcccaaagtgctgtgattacaggtgtgagccactgctcctggcatttttgtatttttatagaaatggggtttcaccatgttggccaggctggtcttgactcctgacctcaagtgatctgcctgcctcggcctcccaaagtgctgggattacaggcgtgagccaccgtgccctgcctgtgttcagttttatctcaataacacagtctcctgtaaatatacttacttttttttttttttgagacagagtctcactctgtccctcaggctggagtgcagtggtgcgattttggctcactgcacccttcgcctttgaggttcaagtgattctcctgcctcagcgtcccaagtagctgggattacaggcacacaccaccacaccggctattttttttttttttttcatttttagtagagacagggtttcaccatattggccaggctggtctcaaactcctgaactcagatgatccacccatcttggcctcccaaagtgctgggattataggtgtgagccactgcacccagccatcctgtaaatatactttctgactttagtaggagaagtatgaataattgggaaaataaatgaaacaaaaataattcaaggtagagtatgtcacaattctgttaaaattttaaaatttaaaatttttcacattttactgaattctgacagcctccttttgagagaaaaaggacaatataaggtatacagtgtcatattaaggaactcttacaaaatgaaaatttggagggtccagatggattcagcccgtcacttagctccactcccacaaacctgtagtctctgtctacttccagagcattacagacagagggagctaactgttgtgctaacatttgtaaatagctctgcagtttagaagagctggatttccaaaagatgtaaatccatgatatcattttagtcctcctaacaattctgtggggtagggattatcattcccattttcaaatgagaaaattgaagatcagaggatgtgacagatccctctcagatactatatctaataagtcctggagtttgaatccaggttttattttcttcttatattttagcattttattatggaaaagtttaaacatacaaaagtagaaaagataataaaagacacctaatatactgagctttagcaattgccaacatatggtcacttttattttatctatactgcctacttccatcccaccttaaattatcataaagcaaatcctagtcatcatatttcatccatgaatactgtacttcaatatacacatctaagagagaaggattttttcctcctcctttcccccctgtagtcacagtttcattattacacctaaggaaataaacagtagtcagtcctaaatattacataatatccatttggtattcagtttcctcaacaattttataaatgtctttctaaaaaaatgtttttttcaagatggagtctcgctatgttgctcatgctgtacttgaactcctaggttcaagtgatcctcctatctcagcctcatcagtatctggaaatacagatgtgtgtcagtgtacctagctttttttttttctttctttttgacacagagcctcactcttttgcccaggctggaatgcagtggcgtgatctccactcactcactgcaacctctgcctcctgggttcaagcaattatcctgcttcagccacctgagaagctgagattacaggcacgtaccaccataccccactaatttttgtatttttagtagagacagggtttcactattttggccgggctggtctcgaactcctgacctcaggtgatctgcccgcccacctcagcctcccaaagtgttgggattactacaggcgtgagccatcatgcccggcctgcccaactttcataaatgtctttttacagttggtctgtgttcactgggatccaaacaaggtgcctgtattagacctgattgatgatctcttaaatcaagcttgtccaatccgcagcctgtgggccaaatgcagcccaggacagctttgaatgaggcccaacacaaatttgtaaactttctttctttgttttttttttttttgaacgaagttttgctcttgttgcccaggctggagcgcagtggcgtgatctcggctcactgcaaccttgcctcccatgttcaagcgattcttctgcctcagcctcctgagtagctgggattacaggcgcccaccaccacgcccggctgatttttgtatatttagtagtaacagggtttcaccatgttgaccaggctggtcttgaacttctgacctcaggtgatccacctgcctcggcctcccaaagtgctgggattacaggcatgagccaccatgcccagcctcaaatttgtaaactttcttaaaacattatgagattttttgtgtgtgtgattttttttcttcttccaatgtggcccagggaagccaaaagaatggatacccctgtttaaaatcttcttaatctatagccatttctcctcttcttttttccccctttgccatttatttgtttaaaaaagtcatatcatttgccctatacaacttctcatattctgcatttgactgattacatctatttatttatttatttacttttcttagatggagtctcgttctgttgcccaggctgctggagtgcagtggtgtgatcttggctcactgcaacgtccacctccagggttcaagctattctcctgcctcagcctcctgagtagctgggactacaggcgcatgccaccacgcctggctaattttcgtatttttagtagagatggggtttcaccatgttggccaggctggtcttgaactcctgacctccagtgatcaacctgcctcagcctcccaaagtgctgggattacaggcatgagccactgtgcctggcccagtttttccaatatttaaacaaccaacctgtgctatagcaagtttcccagtcaaggattcatttatgttcaagcatgctacttataaaataatacagtatattgatccatttataaaattatgcaatatattgattcattttagaatttcctttaaaggctttcttgggtgactaccaattaaccaaaattaattacgttatcccaatgaccaaattaatcccctggtcaaattgaactggatacatgagttatgtgaaaaaccttccaggggttttcacatgtactgatgtttttgttttgtttttttttgtttttgtttttgtttgagatggagtctcaaacaaaactccagtttcccaggctggaatgcaatggcatgatgtcgactcactgcaacctctacctcctgggttcaaagattctcctgcctcggcctcctgagtagctgggattacagctgcccaccaccatacccggctaatttttaaaaatatttttagtagagacaggatttcaccatgttggccaggctgatcttgaactcttgacctcaggtgatccacctgcctcggcctccccaagtactgggattacaggcatgagccactgcgcctggccgtactgatgtttttgattctctggttatacttgaggtagagtaaatgattctaaccagcactggaaccattaaaggaatgtagggcctcgtcagtattagttggttggagaggggaaggaagttaggaccaggcaggaatgagtgggtggagaaactgactcagccgtttggttggcttctaggcatgggaattcagcggagggagccagacctcctatgcatatgatggtagcaagagtagccctcattttattcctgccctttctaatcaggataggcttaggacatgagcagtgggatgtttagtgacatcggcaatgaaggactaggaaatacagactttgatttattttttaagtgattctccatcagctgtgtgcttttaagactagactatgggtttttttgttttgttttgtttttgagactgggtctcattctgtcacccaggctggagttactgtggtgcaaccatagttcattgccacttcaaactctgggactcaagtgatcctctcacctcagcctcttgagtagctgggactacaggtgtgtgccaccacatccagctaattttaaaattttttgtggatacgggatctctgtatgttggcctggctggtagactgtgtttttatttgaatatttgtaccaaaacttaacattctgctgcttattgattatattttactacctaagaaaataaatatgtattatttttaattggcttatataaaacataatacctgttttcttgtagcttttaagtaaaatttgaagcattagatttttaagtgtaggttctttaggttctttttttttttttttgagacggggttttgctcttgttactcaggctggagtgcaatggatcacggctcactgcagcctcgcctcccaggttcaagcgattctcctgcctcagcctcccgagtagctgggactacagaggtgtgccaccatgcccggctaatttttgcatttttagtagagacagagtttcaccatgttggtcaggctggtcttgaactcttgacctcaaatgatccacccccctcggcttcccaaagtgctgggattataggcataagccaccactcccggccaagtatagcttattttcttatttgtaatttattaaagccaaagacaccaagattgaaagcaactgaaaatgaaaatgatatttccggggaggctaataacttacggagctttcctgtggcctcagggtcattgttctctgttagccaatccttagaaattgctagaactcataggaatgcagagttgtatgatgagaagaacaagaacttgggtttcagggagatcagggtaaccttgggcaaggtctctgagtctaggttcccttatctgtaaaatgtctcatgaagtcatgtgagagttaattgttataaagcttggccactcgaaggggcttaatgaatgtgagttatcttcctttctcccagtcctgattttgcaaacctacctactccgtgtttctgctaatcaccagaatgaaacttaaaaaaaaaaagaaaaagctgatggtttaatcttgattttcagtgtcagttaagcataaaataattctattgttttcttatgtgcataaggcttaactttcattggtttttgatgatctctgcatgttatatatggtacatattaaatatagtggccatatttttttttaatttcttttataatatttttttcgagatggagtctagctctgtctcccaggctggagtgcagtggcgtaatcttggctcactgcagcctcagcctccgcctcctgggttcaagcaattctcctgcctcagcctccccagtatctgggactacaggcatgcgccacaatacccagctaatttttgtatttttagtagagacagggtttcaccacgttggccagactggtctcgaactcctgacctcaagtgataggcccacctcaccctcccaaagtgctgggattacaggcgtgagccactgtgcccagcagctatattttataaaccaaaaaattgggacttgtggtgtgataagtatagtatacttaggaaggttaggagaacagaatattttgaagaagtgcactctcagagaaatggtcgctgtgcttttatgtattcataaggaagcagtacaaagttgtggttaggaatgaggccctagagtcctttggacatgaattcacatcttggcccaggcactttctacttactgcacaatatacttaacctttctaagcttcagagcttcctcacttgtaaagtggatattatgagagttccttgtttcttgtgaggattgcatgaaataaagggctcagcacagtcttggcagatagaacttaacatgtaaatgtcagctgttatgtttattactgtaaagcctttgatacgtgcacacttatacagtaaactttttttttttttgcaaaaacctgttcaaaaagcacttctaaaataactcaatatttgcaaacttactctatagtaagttctttatcaggcctcgtacagaaagggcacagaaatattttgaagaccgcatgccctgtcttgcatgcccactgggaagacctgactgactttggccttctcaaaatatttgcataactctcagcacctactccattgcttctgagatgacctctgcaacgtgtatatgttttggctgatacagccaaacttgtcctggacagacttcaaggttcacttaatctactgtcacaggcttctttccctaagattttcttggttgtgccctccctagagtattggcttcttcctcaggctagcagcaaaatagctgcagtaggcctaggccccagatttatgtatggcacccacctaaggaatagaaagattgtcttggctgggcgcggtggcttacacccgtaaaatacctgtaatcccagcactgtgggaagccgaggcgggtggatcacctgaggtcaggaattcgagaccagcctgaccaacatggtgaaaccccgtctctactaaaaatacaaaaaattagccgtgtgtgatggtagacgcctgtagtcccagctactcgggaggctgaggcaggagaatcgcttgaacctgggaggtggaggttgcagtgagctgaggtcacaccactgcactccgacctgggcaacaagagcaaaactccgcctcaaaaaaaaaaaaaaaaaagattgttccttagagtgagaatttttctcagaagcctccagagaactaccctagaatctcattggcctggactgggtcatatgctcattcctgagccaatttttgttagtagggcaatgtgatgccctgatgggcttaggcctggttcttgaacaagccatttacaagagggatgaaattatctctagaccattcagaaacagaattgtgtttctgttaggaaaatttttttttttctatgagtaggtgaatggacgctgagtagattggtcgaagaggaattgtgttggctgctgataacagtgctttaaagaagacaggttatttttctctcaaaaaatattaagtccaaagtagatagtctgttcctggcatggcagttccacagtgccatcaggcagcctagatctttctctctttctgtttcaccatgcttatcacacagcttgcagtcaccaagtggtcgcacgtgttggctctggctctctagccaaacggtctttgaggcaggaagaagtaggaaaggggagggcagaggacaccctttaaagtaccctaagtcccaaccaccatgttcagtttacatctcattgtccattcttacttgtgaagaaggctggtaaatgcagtttcttagctgtacacattgccattccccaaaacagggattctgcagctgtggaagaatgagaaatagatacaagcctggaagtgggcagtgcccaccacaggaggcggccaacaatgtcagctataccctgtatttggagaaaattgcagtttttacattgactttcctctttcttttcttttcttttctttctttctttccttccttctttcttttttttttttttttttttttttttttgagatggaatcttgctctgtggcctgagctggagtacggtggcacaatcttggttcactacaacctccacctcctgggttcaagcaattcccctgcctcagcttctggagtagctaggattacaggcgtgccccaccatgcccagctaatttttgtatttttagtagagacagggttttgccatgttggccaggccagtctcgaactcctgacctcaggtgatccacccaccttggcctcccaaagtgctggggttacaggtgtgagccactgcgcctgcaatgcccggcctgcattataaatatttgttcataatgtgttgctaacagtgacaatcaataagaatcaactgggtttgttccccagcctgtttagttttattattgtgattacaaaataattaaatattatgttaaccaatgaaatgtaaagggaaaaaggaaaaaagatactgcttttatgaaaaataagttgaatgtgcttacctgataaaggcaaatggctaagaaaaaatatttttgtcaaattaggggtggaagagacctctgaaaagattgaagaaaaaaattataaaaatatggagattctgacagatagggtaactctcacctgtaatcctagcactgggaggctgaggcaggaagattacttgaggccaggagtttgagaccaatctgggcaacagtgagaccccgtctctacaaaaagaaaattagccagatgtggtggtgtgtccctgtagtcctagctacttgggaggctgaagtgggaggatcacttaagcccaggagtttgaagttacagtgaactatcatcacgccactgtacttactccagcctgggacacagagtaagaccctgtctccaaaacatatatatacatatatgtttctgccttcagaacacttcacaagtatcattccagtaaaaactgaaaatcatagatgtacatcatgagtgtagttcatgcagaaactttaattgcttgaacttactctcaagaaaaggccttcactgggcacagtggctcatgtctataatcccagcactttgggaggctgaggcaggtggattacttgagtccaggagttcgagacacaagcctgggaaatacagcaaaaccctgtctctacaaaaaatacaaaaattagcaggttgtggtggtgcatgcctgtactcccaactactcggaggctgaggtgggagaatcacctgagcccagggaggttgaggctgcagtgagccatgatcatgccattgcagtccagcatgggtgacagggagagaccctgtctcagagaagagaaggagaggagagaggagaggagaggctttcatcccttagccagtatttggaaaataaacatgcatttttaatgattcctctctttaactgtattttttaaaaaatgagttataccattattagttctgattccatcaaggagagaacttctactttgtttcttaagttgttatgtatgggttactgtgtatcaattgaaatgaatatcaccaggccttattgttggtcattataaattgtgccctggtgaacttctttccagagacatcttctctagtatattttttgtttttttgagttcttttttttttgagacagagtcttactttgttgcttatgctggagtgcaatggtacaatcttggatcactgtagcctctaccttcccagttcaggcgattctcctgcctcagccccccgggtagctgggactacaggcatgcaccaccactcccggctaatttttgtatttttagtagaaacggggtttcaccatgttgaccaggttggtctcgagctcctgacctcaggtaattccacccgtctcagcgtcccaaagtgctgggattacagatatgagccactgcacccaggcccctcactgattttaaataatgtgaagtttggaatgtctcagggagttcaatgtaatggaatttgtcctgatgttatttctttttccaaatcacatagcacttcaaacttttctttttataacatttctcataaatagtcctcctccataattacctttgtgtttattttgtgtctgctactaaactcttagcttgttgaggacaggagtccttccttggacctctgtacatcctaacatacaatgggtgctcaatttatgttcatggaatgagagaatgaatcaatgtcactgtcttctattattgcatagacatcttcagtaacacttcctttgaattcattgtcagtggagctagtcttgtagccttttcaatagcttacattccgtgttggagcaaaaaatgttaaatgtttataaggtaatttcaaatataagcaaaagtagagagaatggtataaagaaacctccattatctataatcaagcttcaacaattaccagcattttagagcaaattttgatttaggataagggtagagagaatatgatgacatcaggatgctgattttgattttgtggggagagaagcaggccatgtgtggtgagcagggtagagaaagaggaggctggtggcccaaatacaaacctgcctcataggagttgtcttgaggatcacttgagttgacataggaaagtgggaagaacaatgcctcacacatggtgagtacagcctaagtgctcccaccaccattactatcactcctgcgtagtttgtgggagctgaatgtgggagctgtggcacttactaacttggtgactttggacaccgacctttctgagctgcagtttcttcgtcggaaaaaatgggaatagtaataacatcttaaacatagcattggcggggcgcggttgctcattcctgtaatcccagcagtttgggaggccaaggtgggcggatcatttcaattcaggaatttgagaccagcctaaccaacatggtgttggttttaatggagaaccctgttctccattaaaaataggctgggcatggtggctcatgacttgtaattccagcactttgagaggctgaggcaggcggatcactggagatcaggagttcgagatcagcctggccaacatggtgaaacctcgtctctactaaaaatacaaaaaattagccgggtgtggtgttgtgcacctgtaatcccagctactcaggatgctggggcaggagaattacttgaacttgggaggtggaggttgcagtgagccgagatcgcacaactgcactccagcctggatgatagagcaagactgtctagaaaaacaaaaaaacccaaaaaaggtagcatcttatcccacacaggcagtggaataatatatgtaaatatgttctgggttaattaacattaatcacaattttccagagtggttttctagtctggagggagggaccatgtttctggaggttttttcgggagtcaagccaattccttctgtgtattctcattctgagacttcataatattcgtggcagagtcatttgtcagcctagcaaataaacattacaggacaataggctttgtttccgtttgcaaaatgttttttaaataatgaaaacaattttactttatgtagcttgtccatatatgcactgaaaatgaaatacttatcaaccaagttgataaagggataaaaatagttttcctaaggaaaactatttgctggggatttgtgttggacaagttttgtagcagtctgtttccccgtctttgaaatataaacagcatctttatttgtctagattttgcttataacaatttgctcaactcctaattaaagatagctctgtcatccacacatcacttagctactttcctaaagccagaatttctttagaaaatcagttttcttttaagacttcaaaacactttgccttctccttagtactataaagaattctaattatgtaggacattcatccagccactcctcccaccacacacacacacacacacacacacacacacacacacacacacacacacatatatctgtctgagataataattagatactgtgggaagagaaatgaaatatccctgatggttttaataattttctgcagtgtttgtttggacaagaaaatcagctgtcacatcccctgggtatgagagttatataaacccagatcagaaagtcaatgctgcagacttaaattctcaggaagttttaaaacttttaaaactaccacttgccttttggatttgactttttaaaagtttgatttttgctttttcagatactaaacttttggcattcttagtatttgtgatttatagcatcttgtacttttatagacttacttattcaaacaaactaaacccccactctatgcccagataacaaaaaaacacgtacaagatacagttttatctcaaaatgagcaatatcctgaagctatcatttggtcccagtgacatatgaactgttcgtttttttccccatatactgttctgtgtaaatgttctattacacagtctttttttctggattatttttctggagatttcgttatactttgttgatgtttcttttcaaaagctcccgcacaaatcatctccagtagtcatccagccagtgttgtactagaagatgtgttacttctaatttaaacttccatttaaggcttgacgctgtggctcacacctataatcgcagcactttgggaggccaaggcaggaggatcacttgagcccaggagttcaagaccagcctgggcaacaaagtaaaaccccatctctacgaaaaatggaaaaaaatagctgacatggtatcacatgcttgtagtctcagctacttgggaggctgaggtgcgaagatggcttgagcccgggaggtagaagctgcagtgagctgtgtttgccccactgcaccccagcctgggtaacagcatgagatcttttctcaaaagaaaacaaacttccatttgagaaagtgacagaaaagttttggatttttgtaattataggaattctttacttttctttgataatattatatctctttcagtgaaaagggagttaggaagagatctaaatgtactctttgatcttccttgttaatcatttaaaaatggaattcggagctaattttaacttctgaaggacctgggggaattttatctagcacctgaggtataccttagttttttatgtattgaatctttaggaccagttttattctttcatttaaatatgtagtgagcatctagtatgtgcttaccattgtgctgtgtgtttatatatattatctcatttaattctcacacaagcgttgttagatacataaaaggggacttcaaaaaattcatggaaaaaattgaattaaaagataaaaatgaaaaatataaactttatttctcaatataaactccatcaagttcaaggcaatattgtagtgatgataccggccatttagcccgtccctaaagaactgagggttctggaaatttagccatattaatgcagtcttttttacattattaactgaaaaaaaaaatggattccctttaaagatttcttaagattaggaaacaaaaagaagtcagaaagagccaaatcaggactgtaaggtggatgcataatgatttctgtgcacagtgatttcccattgaaatctcgcaaaaattgcccttgtttgataaaaggaatgagcaggaggagtgttgtcatggtggagaaggactctggtgaagctttcccaggcgtttttgtgctaaagctttggccactgtgcccagccacaactttcattttgttaagtcatctaatccttacaactgctccatgaaataggtactattattatccttatgttacagatggagaaactgaggcagagagcgggacagtaacctgcctaaggtcccagagctctagagtcagtggtcttaacctctattatgacctctcacttaatgagggccagatttcccctctagctttttattatgaaaaatttcaaatgtggaaaaaaattaacaagagtacaatgagcacctgtatcaaaaacctagcccaaacaattgttaacattttgctgcatatagtttatctgcatgtgtgtatttcaattttttgctgaactatttgaaaatatattatggacattataattcactccttaaatacaaaacaaagcaacattttcctgttttttttttgagacggagtcttgctctgtcgcccaggctggagtgcagtgatgctcactgcaagcttcgcctcccgggttcacaccactctcctgcctcagcctccccagcagctgggactacaggcacacgccgccacgcctggctaatttttttgtatttttagtagagacggggtttcaccgtgttagccaggatagtcttgatctcctgaccttgtgatctgcccacctcggcctcccaaagtgctgggattacaggcgtgagccaccgcgcccggcccaacattttccttttacttggtaaatgcattcttggaaaatacattgcctctaaaatcatgcaaaagtactttgctacagacaaaaaggagtggagttctaggttcagataactgtaaagagctttacatgagtatcttgatatttaaaaatcaagcagagtaaagggacaatttttgtttctataagacagcccctcaatttgctggatgtttaacatcttggtctctacctactaaatgcccatttgaatgaggagacaattgactgttgtgtcaaccaaaaaatgcctcccatcccctccgtttccagaaagtcctctagccagctgtgcctgttgagtgtcattgacttgactggtcttctgctgaaggagctataggttaaattaaaataaaatgtgctgtcacagaatccttatcatcatgattcagagttgaggtaataaaggtggtagaacttatctgtaattctcctttagttctacaaccacatatgctctagatttgtaaacaaatattcatttattctgttgtattctaccaccaccactttgttccacaaaaggttatacagcagatttttatttatttaaccattaagagtgtctccccgtgtattggaatcggctaggaaatattcgtaattgctacacttttctatataaaaagggacttgaagcagactcagggccaacacaatgtagaatctgtttcttctagctttatttctccctgtgctgctagaggtaccaaagggtttgtctcaactgttactacccctgacatattccattgatctctttacttttctctgttgtctgtcagtctgtttgtcagacttatctcaaatgccacgttgtttgcgcgtatttctcaaagccatccatcaggatacaatctaaatcatcacagcacattctgtcttgtgacactaagcacagactgcctgtgttacatttgattgtgtgtttcccttttcttccacatatgtttcagtagtaatttcctgggcaacttatgtgtggcgggccttgtttgggatcttggaaatagagagatgaagctctcctacatagtctcatttacttccaattttgctttcttgataattggagtagccttttctagcttgtatcccctgcagtacctgatgcattgccttgctcagggtaattcatatatatttctgaattcagtttggaatgaaaggagacaagcaggcacttttgaatcaaatctggtgctgccactatgcaactgtatataaatctaacccaacccctgtgcgccaggttccttatctgtaaaacatggataataacaaccatcttacaggattgttgtaaagtttaaagatgaattgtatgaagcctagcagagttattggcacgtagtaggtgctcatgaagtagttgttattgtaagggaggttcagtcattcctttaggtcacttgagtgggcagtggaagcatttaggatcttaattgtctttagggaaatgcttacttagtctgggggcttctccgagaagcaggctctggggaaggtctggctcattgctgattaactgttccctttttagagtcaatgatctgagtctgtgttttggaaccacttatataatgtataccacctgttatttgtgtatttttagaagtgggagtcgggtaatcctagtcctgtcagtaaaagagcaaactgtttaccagaagcagagcttttttcttaacactgactcacactgactcatctttctcatttttcttcccaccgcctcataacaaccttgcaagagagagaatttttagggaatcagttgacttacttttttgtgattttccaaagttgaaagcttgaaggtatcaggtcattaattccatcccaggaaaggctaaagtttatgctgcctcggagtgccagtatgaccaacgccatgtagtgaatatctcacataaacccttgtctagacaaaccacttctgttggctgagaggttagacaagtgcctgaagtgtacatgttaagagtaaacacattttgctctttgaaaatggttgccttaagttgaacctggaaagtttgctcttctgagataggaaacccaagcagtattagagtcagagctgtggtagcttcacagatggatttcagataacagagaggccagacagcacattagatcagcaaaatggtgaaggaagctttatagatcagaatgactgatatctttgtgccttcatttaacattcattaaatgaacatttactgatcatctgtgatatacttggtgctagggttatgacagtgactaataaaaacatagtgcctgctgtcatggaccttatactctaatgctcgtttatagtaaatgctaagggaacagagagatgccttggcctgcatatgtgaacatgttcctgtgcacacgggtgaggggaggaaggaaggctccttggaggaaaaggcacccaagctgagtctggtggggtgagtaggcattaactaggagaaaagggttagttaggggaatgtggggttggctgaagagtattacatgctgaaatgagctatgagtcttggggtcgagagaagagcttgcccttggagaagctgaaaaaagtgaccaaaggacagtgagagggaagtttggcacaaaataaattcagagaagctaacagtgacagcagagcattgtagaccagtttattaatttaaaaaaaaatttttttttttttgagacagaatcttgctctgtcgcccaggctggagtgctgtgatatgatctcaatctcagttcactgcaacctctgcctcgcaggctcaagcaattctcgtgcctcagccttcccagtacctgggattacaggcacacaccaccatgcctggctaattttttttttgtatttttagtagagacagggtttcaccatgttggtcaggctggtctcgaactccggcctcaagtgattcacccacctcagcctcccaaagtgctaggattataagtgtgagccactgtgcaaggcctaaaaaattttttaatccagataaatttaacatatagtgaaatgctcatgacaaatgcatatacctatgtaaccaacaccccattttgagtaggaacttttaacttggtagtcagagcaaggggaaggatgggtttttgagcagggtccagacttgatgctaattgctagctaagaactgggacaagggtgagggggtgagggggtggcaagtaccagtggggacagagctggaataggcagtagtttgctggtgggcaggagcttccagcttgggggcaaaaaacagattcttggttttcctaacttgtttttagcagaggacaaacctctaagtgctttgtaagatccaaagtgtctatgcagaagacaacagactgtgttttttcaaagattttctgggaagacttccaggctacctgcagtttgaagaaagtcttctgaaaagggcagggggcgtgggggcacctacagagacaggatttcccccaactcgataagatacaggaaaataatcatcttattgatttacttttgttctatagtaatgtgacattttttcttttctgagagtagggtattaaaaattgttacggttttgggttttacagatttgttgaagcttaatatcatttaagtgtcctattttaatatctgttttaatatctgtatttttgacagactgccagaaatcatttaacatgttactgtgctatttttgttgatgttgtcattattatttttgttgatgttattcttaaagaaaaaagaaaagatactatcgatagaattatcgtcagtattagaaattaagaaatgttttaatttcaattgaaaacaaacaagtaaacaaacatgaaaatgtattgagagatgtgtgtattctctacctttgttttattccttttacaaaaactataaggaatagtgcttaacagtgtactgtcaaaacactgacatctatttacaggaagttcatttctgaccagaattgtttgtttgtctctccaaagcttgccaaattctataggttttatgtaagtttataaatattcttgtaaacattggctttaaactaaatccttctaaatatccaaactaccatgtatctttctgtgtctaaattcagagataccatcctgttggctttagataagttacagagtagtttaggcccacatgatttaagctcacccacagttctttgttgatacttgaggatttcatctgaaaagcatcctgttcatactctgaaaatatttctttcatcttagtactcccactcattttgtgtgtgtatatgtgtatagattattttattgttccacatatatgtatatttattttttgtccacttgctagggaacctcattttttttaacaagaaaatacttgtgtgataaggtcataaaacccaagagttgggaggaatattagagacctactttatttattttattttattttatttttttgagacggagtctcgctgtgtcacccaggctggaatagtgcaatggcgtgatctctgctcacggcaacttctgcctcccaggttcaggcgattctcctgcctcagcctcccaagtagctgggactacaggtgcgtgccaccatgcctggctaatttttgtatttttagtagaggcagggtttcaccctgttagccaggatggtctcgatctcctgaactcatgattcacccgccttggcctcccaaagtgctgggattacaggcatgagccaccacacccagcctagagacctaatttaaagtttattgctgctttattactctgaacaactacatcatttattacctaaaataatctttttattttctgttctcatttagctgaatctctgagcttaaaaaaagtgtgtttggcttatatatcacattatcccacatatgttacaaccaaaacttaattattagccataatagtgtcttttggctaatattagtagtaagatttttgtttgtttgtttgttttttgagatggagtctggttctgtcacccaggctggaatgcagtggcgcgatctcggctcactgcaacctctgcctcctgggttcaagtgattctcctgtctcagccttctgagtagctgggattacaagcgtgtgccaccatgcctggctaatttttgtatttttagtagagacggggtttcaccatgttggccacgctggtcttgaactcctgacctcaggtgatctgccccccttgtcctctcaaagtgctgggattacaggcatgagccaccgcgcctggccaatagtagtaagttaatgaagatctgtactaaatttggattccaagtgaaacatttctttttttcttttttatttatggcagagtagagggttgatagatatttgttggctttattagttttctcaaattggtatgtaaaaataatactagatatataggtttaagtctccttcataagattttctttcttctaaacctttggaatatgccatgcttttcaaaaagccccactcattatttttatgatagtggaataaaagtctccaatttgtcaagctcattattcaagccttccaggattgtttgcagttttaaaataaactgctgggggttttatgcatcttgcaatatgagtacttaattaaaattaaaaagggggccatgcatctatctattctattaaggtcgtatataaataaatgattttattgggattttcagtgtatttagagtaatctatacttaatgagagggacttgtacttttcatttctttgtactatttttcagcctttcctgaacagtaaatgttttaaaaaaaactatacccttattccttggtctctaagaactgtggtgggctgggcgcggtggctcacccctgtaatcccagcacttcgggaggcaaaggaaggtgggtcacttgacaaggtcaggagttggagaccagcctggccaacgtggtggaacctcgtctccactaaaaagacaaaaattagctggtgtggtggcgagcgcctgtagtcccagctactcgggaggttgctgcaggggaattgcgtgaacctgggaggcagaggttgctgtgagccgagatcgcaccactgcactccagctgggtgacaggtgacaggtgacaaaaaaaaaaaaaaaaaaggccaggtgcggtggcttacgcctgtaatcccaacactttgggaggctgaggtgggtggatcacaaggtcaggagatagagaccatcctggctaacacaatgaaacactgtctctactaaaaaaaaaaaaaaaaaattagccagccgtggtggcgggcacctgtagtcccagctgctcaggaggctgaggcaggagaatggcgtgaacctggcaggtggagcttgcagtgagtgaagatcacgccactgcactccagcctgggtggcagagcaagactccatctcaaaaaataaaaaataataaaaaaaaaagctgtggtggagtatatggtacaaacatgagacttggtgctcttttggattcctaaggcttttccatgtctgagaactcaggaggcagcctttgcatagcagagggactaggaacctcactatttctccaaagttgactagctttctataagataacccccataaaatcactagtcattagtaataaaactttgtctttaaatgactataatatttttaaaaaggacaatgaatatgtactctatgccatccctttccatactgtaaatgtgtttctgaaaggtatgctatttagatatacttgagtcctattctaatatacggagaggttgctttttaaattgtcctcatcattgtggtagtaatagtaatattagtagtactggtagttaacatttatggaacacttcatatattttacatacatagcttcctttaacccttataataatcctatgagttaggcattttattctctccattttgtgggtgggagaactgagacttgatatgtggactatatgattgatcgattggttgattttggtaaagttcagatatcttttgtcctgtgcttgacactctaaaatagtaagtatttgggtaacaaataattgtaagagagagaaaatcatcttatcttttggactattcccttctattccattcctactgccaacactccagtccaacctcacatttctttttctttctttttttcttttttctttctttctttctttctttctttctttctttctttctcattctttctttttcattctttctttttttctttctccttccttccttcctctctctctttctttctttctctttttctctctcttctctttctttcttcccttctttcccttccttcccttccttcctttcttttcattttctttctttctttcttacagggtcttgctctgttgcccaggctggagtgcagtggcatgatgacagctcactgcagcctccacctccacagctcaagtgatgctcctgcctcagtctcccaagtagctgggactataaatgcgtgccactgtgcccagctaataaagctccttctgctgaagttatgcctaaacccttctttgcacatgtcattccttatcacttatcacctaaagaatgacagggggctttggctttgaatggccctcagtatgtataagcacctaaagatttcagtttatctcagcttcagagcagtccatctcatctgcctgtttttcttcttaaaataaacttttaaaaaataattaaagtttttaaaaggtgcagaatatttaagtaagatttcttctcccctttcccctaaatctccattctcatttcgtagaagtaaaccattcttaacaatttcctggataattcttccagaaattatgcatgtccaaacataaatataaaatctattggttgcttaaaaaatctataaatgagatcatattatacaaactattctactgctattgttcacatagatacattttattcttttaaatgacttcatggttgtatcacttacaaaccttttggctttgagtaacagaagcagggaatgtacagaaggggtgtcagacaaggcttccaaattatcagaaccaaggcaggccagggaatcatcatcctgttttagctgaagcagccaggccagtatgttgccatcactgcccttggacactgtcaggaataaattccaactgttcctttgtcatagtgtcattttttaaggttcagagtcccagtgagactatgcacaatggggaagtacccccaaatagaaagaagtgactggatgttggaaaacttaaaaaatgatacatttccattacattggtattctattgtataaacatgccataatttatgtattaataactagccacttcttggtgaatattcagattgtcatattcaattttttactagcaaaaaccactgctgcaaagaaaattatttatgtctttgtgcatttttgtaagtatatctgtgagattaatttcaagaagactgtgctggatcagagagtatgtatatttaacattttgatgtagcgccgggcatggtggctcatgcctgtaattccaaaactgagaggctgaggtgggcggatcacttgagctcatgagttccagaccagcctgggcaacatttttttcatgggcaaaacccggagaagaaaatatgaaaaaaatacaaaaaaaaaaagaaagaaggaaagaaaaaagaaaattagctgggcatggtgttgcacacctgtagttccagctactcaggaggctgaggtgggaggatggtttgagctggggaggcggaggttgcagtgaccagagattgtgccactgcacaggagcctaggtgatagagccagaccttgtctctaaataaataaataaataaataaataaataaataccattgtgatgtatattgtaattcatgcttagaagctttcactggtttacactcccatctacaaagtgaactggcttttaacttacaagatacaaagttatttatggccatatattcagcaaaagccacaaagtgtcacaccaggtgaaaagggaagtccaagtttctgaggtatagagtttcagtatttatcaggtaagcatagctaccaaagccatttttgttctggaagcatttgctgatcccgagaaagcattttttaggttaagctgtatttttggtgtcttcatatatgaggacagaattcttagcttgttgtccgtcaaggatggggaatcagataaaccacttttttagtttgaatggaacccctaagggcataagagggaacttgaactaagccaaccctcacaatagccttgccaccaagcttctaggtgtagggaatgtagaccaagatctttcatcattatggttctcaagtaataatgccatcaggcagctggcagaagcaaatgcaaattttctctcgaggaagatgttatcatcccggacatcaaaatagtcctctaaataattttttatgtaatcactagcacatgggattaaaaccaggttcacaaagaaataagataccatgaaaagaattagcaaaagccatatacaacaaaagtatcaaagccatgagatactggaatttcagatgcagaatgtaaaacactgtatttactatgcaaaaagaaatagaagccaagataaaaacgtcacaatgggccgggtgtgatggctcacgcctgtaatcccagccctttgggaggcctaggcaggtggatcaccaggtcaggaattcaagaccagcctgaccaacatagtgaaaccccatctctactaaaaatacaaaaaattagctggatgtggtggcgggcgcctgtgatctcagctacttgagaggctgaggcaggagaatcgcttgaacccgggaggcagaagttgcagtgagccgagatcgcaccagtgtattccagcctgggtgacagtgcgagactccgtctcaaaaaaaaaaagtcagtaagtagacactgtcaaaagtgacagcagatttgaaaaaatccaaatagacattctagaaccaaaacatataataatcaaaaacaagaatgcagtggatgtatttaaagtagattacctagcaagagagaactagtgaactagaagatagaagaaaattctccagaataaaccttcaagagatttaaaaaatgtaaaatatagaaaagatgattagagaattaaaacgatccagtgacaagttctaatatgcatttaaaaaaatttttttttcaagttttttcttgctgcagtgtccaggctgaagtgcagtggctattcccaggtgagatcatggcacactgtggcctcaaacttctggcctcaagtgatcctcccacctcaggtaaataggtgggactgcgcccagctttaatatacatttaattagaattacaaaatgagtggagcaagaatggtgcagaagcaatatttgaagagataattgatgatcattttctagaactgcagaaagatgaatttgcagattcaaaagtgtatagccttaaagaaaagctaaaagctaaaaactgagcaagcatccatcttgtaagtcagatcacattttgtaagtcagagaaaacacagcaaaataattctgaagaagataaagagaagctaggcatggtggtgcatgcctgtagtccaagctgcttggaaggctgcaatgggaagattgcttgagttggaggccagcctgggcagcatagtgagaccccacctaccctgtctctaaaagaaagaaaataaagggaaagaaagaatgaaaagagtagaagttatgaagtataaagcaaatgtatagcagggaaaatcaatgaagccaaagtatgattcttagaaaagattaataaaaatgataatactctgattaggttgatcaagaaaaggaagacagaaataaagaaaggagcacaaataaccaaaatcaagaatgaaaaagagggggctgggcccagcctttaatcccagtactttgggggaccgaggcgggcaaatcacttgagctccggagtttgagaccagcctgggcaacatggccaaacgccatctctacaaaaattagccaggtgtggtggtgtgtgcctgtagtcccagccactcaggatgctgaggtgggaggatggcttgagtcttggagggggaggctgcagtgagcctagatcgtgccactgcactccagcctaggggacacagtgagaccctgtctcaaaaaaaaaaaaaaaaaaagagtgcttaaaaaaaaagagtgaaaaagggagatagtatactcattaacaaaataatgatactatgaatactatgaataattttaaaccaaaattttgaaaatttagatgaatggataaatttattagtaatataactattaataaaaatggagtcatctgggcatggtggctcacgcctgtaatcccaccactttgggaggccaaggcaggaggatcacctaaggtcagaagttcgagaccagtctggccaacatggcgaaaccccatctctactaaaaatacaaaaattagctgggcgtggtggcctgtgccagctgcttgggagactgaagcaggagaatcgcttgaacccaggaggcggaggttgcagtgagtggagatcgtgccattgcactccagtctggttgaaagaatgagactccatttaaaaaaaaacagaaaccaaatggaatcagcagttaaactcttcccttaaagaagactactagcccatcactaggagtctaccaagcacttaagagaaagaattaatattacacaaatgcttcctgagaatagaaagagattagcaaaacaaaaaacctgacagtgacattatgagaaaggaaaaatcataagcccttttactcaggaaaatttctacattttactatgaaaaattcccaactatatattagcagagcacaatccaatattttacttattattgtagtataacaaactaccaaagttttgtggcttagaacaactgattttttttttttccagagattctgtgggtcggaagtttggactgggcacaacaaggatggtttgtttctgtttttgtctaggttcccagctgggaagactcataggagggcttggaatcaagcccttggcttgttgatctttgtcgtgtcaatttcttgtttttcttttttctgagacaggatcttgctctcttgcccaggctagagtacagtggcataatcatagctcattgtagcctcagcctcctgggctcaagcgatcctcctaccgcagcctcctgagtggctgtgactacaggcacatgccaccacaccttgctaatttttgtatttttttgtagagatgaggtcttactgtgttgcccagactggtctaaaactcctggactcacgtgatccttccacctcagcctcccaaagtgctgggattacaggcatgagccactgcacctggctgtctgtcttaccagtttctaaaatctctttatgggttaaggaaataagctatttatattgataggaaatataatttcctctagcctgacatttgatttttattttgctgatcatgctttttgccatgcagaatatttttatacatagtcaaatttattaatatttcctttaatgacttctggattttatatcatagtacttggaaataccttctccattgtgaggtcataaaatatgccatgtgtttttccagtgcttttatggtttcatatttttacatttggatttgtggatcctccaggagctatttttggggtgaggtaaaagactacttattaacctcgcttttctcagtcagatggagagattaattttgactgtggagaagggggctctggtaaagtatcttgatcatctcttagggtatgggattgtgaggaattactctcttttcacccaaaggaattggaatgagcatctgaagtcaaaactgcctctcctctacagcaggtgggaaaaattgttttaaactgaatcctttttcactgttccttctcatttcctaagactttctgctaccgtggtatcactggcctcatgacatgttatgattttgatctcgtttttgtactattttagtgttttttttttctgatgtcatgaaaggacacagcttcattttatgtataagctctctctaaattgtgatatagtgttgagttactgtgaattctagccgttgttattattattttttttagagatggggtcttgctgtgttttccacagcgagaatcagagctcctgggctcaagcctcctgcctcagcctcttgagtatctgggactacaggtgttcccggctttagccattatttctaggatcagttttggagggctctcctttcttgttttgttgtttgatcccaagtccatctcaggcagtggtctttctgtaactttctataacactccattcatttattatattataagataggctgtgaatataggagaaaacagaccttcatgatcatgatttcacattcctatcattgttccagacatgtataaacctctcagacctttgaggcttagtctaagataagtcctttgaacaaccagtaaaaatcattaataaaaataaagaaaatcagcaattctttttcttcattaggacgtgttgaccttgatacgaatactactatgctacttgttcttggatgaatgataccaactttgacctgggcgcttatgaaaatattttaaagcatcacttaaaaattacctttctcaccattctaactaaagcaataggttttgtgtgttagtgggtttttttctaatgtctacttatgttcatttattaagcgccttctgtttgtcaggccttctgctagtgctgggactatagagttgaataaaatataaaattttccatctactaagggagatagaatataacaagtagttataatgtacagtgctgtgaactataatagaagtgttattgggggcatgtattggtcaggattcttagtagcaaacaacaaaattcactgtagttggcataagcagaaaggtagttttaacatctgtgcttggatgttacacagatgaaagtgaagcaatcacagacaatatttccatgagaaatggtcaaccccactaagggggactcttctagagaaaacaccactgctgcctttaccagcactggtgacatcagatactggacatcagaaactgtcccataacagtcctagaacatgggcttataattttctttacgttttctagtgcagttagatgcagttagcccattcataatctttatatccttcatgcccttcattggtctatagcaactactactgggtttgaaatagccctgactttaatatggactttacctcaggcaatcataggtgattattttattatttatttagagacagagtattgctctgtcgcccaggctggagtgcagtggcacgatctcggctcactacaacctccgcctcccgggttcaagcaattctccctcctcagcctctcgcgtagctgggattataggcacccgccttcatgctcggctaatttttgtatttttgtagagatggggtttcaccatgttggctaggctggtctcgaactcctgacctcaggtgatctgcccaccttggcctcccaaagcactgggattacaggcgtgagccaccacacccagccaataggtgattattttaaaactcttacaacattgcatgccactaactacccgcatctcattctctaagacagagattgggaaactatggcctgcaggcaaaatccagcctgccacttgtttttgtaaataattagttttattggaatacagctatgttcattttgtttacacattgtgtgtggctgcttttgcactatagtggcagagttgagtagttaccacagagaccacaaagcctgaagtacttactgtctatccacttacagaaaaagcagaaaaagtttactagccgctgttgtaatgcttattaaattctctctgccttttaagtccagcaggtgaggtaaatcagtttctttcaaactttttgactttgaaaataagatgcacaatttatattatgactcatgcatgcatatcatatattatatgtaaatgaaacattttcttcttttcattctattctataccgtttcatgttttgaaaagtatgctagtcccagctgggcatggtggctcatgcctgtaattccagcactttgggaggccgaggcaggcagatcacttaaggccaggggttcgagaccagcctggccaacatggcgaaatcccgtctctactaaaaatacaaaaattagctggatgtggtggtgcacacttgtaatcccagctactcgggaggctttggcaggagaattgcttgaacccagaaggtagaggttacagtgagccaagattgtactactgtacttcagcctgggtgacagaccaagactgtctctaaataaataaataaaaataaaaatatgctagtcccagtctactaaattgatttcatgttccacaaatcagttgtaacccataggtacatgaataggcatgttccattcatgaattatccaagatctgtttcatttccttaggagttttgtctgcattcccttctggtttccattactcaatctgtcaggattctcaggtgctactaacaataagtgtctgctccagctggtttaagcagaaaagcatttcttaaaaaaaagtagggatcttacagaatcttatagagggccagataacagatcctagtgctacctagatggcagttaagcagcaaatgaaatgcaggctggggaaagccatctaactacaccatgagacttccctagagaaaaccctattcctgccattgcgcagcacctgtgaccctagggtctggctaccagatatcctgcaaggtcagccccgtaagaactcagtctctgtgattgtctcaccaaagctccttgaaggagggctctcctggctcaggagctcagaggctgctcagggcatttctaccttttggaatcctgcttcattttcatctcgctgttctaaaactcctaatttttcttctcctattttattttccttttcttcagctatctactttgctcctttccttctccttttcctttatcctcatactcatcttggccattcctatcatcaggtggcgtaactcaaggctgaggtccctgaacagagcttagagctcatttcttcccactttcagtgtaccttcaacggcttttctagctactcctcattgaggttgtccagcttgtgtttcttgtgcaccttccagtgccgggcacaggctgggcagcacaccttctgggccaggcccaggattaagaacaggagcagggccctagagactgagactgttcccggctgacagagtgtggcttatgtctctcttcaccatttttaatggccagacaatgtgtttgatattttgattatttctattatttcactattataaataactctgcctgtaatcccagcactttgggaggctgaggctggcagatcgcctgagcccaggtgtttgagatcagcctgggcaacatggtgaacccccgtctcacaaaaaaaatacaaaatgagctaggcatggtggcgcatgcctgtagtcccagctattcaggaagctgaagtgggaggatcacctgagtctgggaggtcgaggctgcaccatgatcatgccactgcactcgagcctgggtgacagaatgagaccctgtctgaaaataaataaataaataactctgatataaatgtctctctcatttataagtcagtgtatgcacattttgtagcacttggtatgtattttccaaaggaacttaaaaataacttttcgtattttttctttttgtagaagtaatgctatattttagtgtaaaatactattttatagaaaaaatttaaaataccaataagaaaataaaaattacccacagtgtcatcatcctgatatgctactgattaatagtttcttccatttttttctactttccgttttacagacatgagccccttctacatataggggctcaccttaacattaaagtgagacttttttttttttgagacaaagtcttactctgtcgcctgggctggggtacagtggcacaacctctgccgcctggtttcaagtgattctcctgcctcagcctcacgagtagctgagattacaggcacctgccaccgcgcctggctaatttttgtaattttagtagagacggcgtttcaccatcttggccaggctggtcttgaactcctgaccttgtgatccacctgcctcagcctcccaaattgctgggattacagtcgtgagccactgcacctggctcttatgtgactattttttttaatgtcatcagatattcttcgatagtatcatttattgtgactgtgtaatattccattctgtagatttaccaaagtttatttaaccactgcctaatagtggactttaaggattttcagttttacagttttctgaacagtgctgaagtgaacaactttaagtcaagtctttgcacacacatctatagtggtttctcttggatagattcttagatgtaagatgagtgggtcagagagcatttacattttttaattaagaaactttattttttagaccagttgtaggttcccagtgaaactgcacagcaagtacagagaggtcccatgtcccccctacatttttaaggatttcagcacatatcgtcaaattgccctttaggaatgttgtaccgttttccattttcacctacattttctcatatctctgcaacactgagaaatatcatttaaaagaaatctttgataaggcacatgtctagtagaatacctattccagtcaagctaagactaaattttctctctcctgaaatttatatttacattattcagtccattattatttattgtggttagtgatcacacagttccaccaaccttccttctttggccaatttaacaaaaattataaaactaatacatagacacaaaaataaacattcagaacagaaagatatagcgatgaaagtaaaaaaaatccccacttgctttagccaggccttctgaaagcggtttgttttttactttaatgcttttttgtaattgtggtggttacttccaaaactgtaaataaaatatacataaacatgtaatttttattttttttgttattttattttgtcattttatttatttttttttgaggtggagttttactcttgttgcccaggctgcagtgcagtggcgcgatctcggctcactgcaacctcggcctcccgagttcaagagattctcctgcttcagcctcccaagtagctgggattacaggtgtgagccttgccatatcgcacactccccgtgtaatcctgctgtccagagatatacaatttggtgtattgtatatccttttagagatttaaatgtaggctgggctcagtggctcacgcctgtaatcccagcactgtgggaggccaaggcatgaggattacttgagaccagaagtttgagaccagcctggcgacacagtgagaccctgtctccacaggaaatgaaaaaaattagccaggaatggtggtgcatgcctgtagtcctagttattccagaggctgagttgtgggagaatcacttgagactaggagtttgaggttacagcgagctatgatgatatcactgcactcctgcctgagttacagtgcaagaccctgtctcgaatgaatcaataaatatatcagtaacaacaaaacatggactgtgagccaggtactatgcatagtctcattaaatcctcatagtgtctgagatgggggcccttgtttaccaaaacgtaaacttgaaccttatggctaactggtgacttgcctaaacatttccagtatttcctatgataagttgtatgcaataaataagatgtatctaattatgtgttcttgtgtgatcatctccatttaatacatttccacaactaggatggtttggtttaaaaagtgtgcacatttaaactatttaaacttttgtatcatcctgagggaggtagtttagagtgtggactttgtcgtcatacataccagtatttagattctgactgccacttactggccactcactaaaatgaaactgtacatcagtttacctatctctaaaatggaaggataacagaagcctcatatggctgtgaagattaaatgagatgctgctgcaatgtccctggctagtgtgcagcacctaggaagaatggtgtccaagacagaccaggcccctcatctcatagaactgatattttaatgtgggacaggaggaggcagcagtgaaaggcagtaaagaaatgaatgaacaacaaaaaaaagtggtgctgtatggacgcttaacagaaagtgacatgataggtagatgggtggttattttaggttgggtggcttgggaaagtttttctgaagaagtgacatctcagctaaggtctcagtgataaggatagttttataattcaaaaattcctagaaataaaaacatgggatcaaacattacatgcattaggccaggcaccgtggctcacgcctgtaattccagcactttgggaggccgaggcgagtggatcacttgaagccaggagttcgagaccagcctggccaacatggtgaaaccccgtctatactaaaaatacaaaaattaaccggatgtggtggtgcaggcctgtaatcccagctacttgggaggctgaggcaggagaattgcttaaacccaggaggcggaggttgcagtgagctgagatcgtgctctcactacagcctatgcgatagagagactcaaataataataataataataataataatgacaaaatgacctgaaaaaatttttaaataatttgcattctatgtatagacatgcctctttttctttaccattaccagaacttttttcctaatgtaaaaaaaaagtggggttgttcaaagattgtcttagggaccttctaatgagctttactggcagagggaaaagataagaaaatgtgtaagtcccttttaggaatctcttctatttcctctccctgtgttaattgtctaccatcatccattatactataaaccgttgtcttcactttactggcctttttctttacaccacatcctgcctacattgtaggactggaagctgccaacatgcatgttaactaacaagcactttttcgtctttagaattaggcagtgcctgggtcaggggagatgcaagattcagaacagcaatgcttttgctataaaaacaaggcagcttttagggtagactggtttttccaaacaaattcattgttaaggctgtaacacgttctgtgagttaaaactgtgcagaaggctctgcacatatgtttgttacagttgagcctttttcctgtatggcatgcaatgggggcaatgggcattggtgaacactgtacactaccattgcttccacaggtaataagacctcttgtttgtaacgtgtatatgattacatattgtggatctgttctgaaagcctttaatcatcgtagaaacgttctctttgtagggcttgagcaggcctcagcatctttacgacaatatacatgtttttgtttgtttgttttgagacggagtctcgctctgttgcccaggctggggtgcagtggcacaatctcagctcattacaacctctgcctcccgggttcaagcaattctcctgcctcagcctccccagtagccgggattacaggtgcccaccaccacacccggctaatttttttgtgtttttagtagacacagggtttcaccatgttggtcaggctggtctccaactcctgacctcaagtgatccacccacctcagactcccaaagtgctgggattacaggcgtgagccaccacgccaggtcaatatacgtgttaaattatagacatcactcagttactgttttgttcatgtatggggcaaatatatatttttatagaatatacatgtattataatttaatttctgattcaagccttaaagaaaatatgtagttcaaacttggaaataaatggattaaaagtcacttgctcttaaaatgtggtttctttttataatcttttaaaattcagcaacttaaataaaacatcctgagggcaacatgtgttagtgagggggactgggggtggcgtggggagggagtgtgtttgatgaaattgtccaggagcaaagcaccacttacttgaagcccagagatttgtcatccaaatatgtgcagattgctgggctataaatagtttgaactcaagtaaacagcctcttctccctaactgctgcttggccattgttcagatgccagcacagactgaggagcatctcacaccaagctcaaggctcttgtgcccaaattttgggctgcttctcttgtggggagagcttcagctaccctgacttgagatgaccaagggtcacatgttcaccctctttagttatcccacgtttggctcccacccctatgcaacctgatgtacagtttcataaacatgcctctgctctgatgagtagcgctgatctaagaagattcctggcaactattaaaaagccctggggccccatggctgttgactgaagtagatttaggaagcacagaagttcttttttcagggcagaggcacgcatggctcatttctttctttggaactaagtagagtggcactggttgtcagaactgctgcaggctgcctgtgccagcaactcatctgctctgtgccaggcaggcaggctgctgacatttcaagagtccctttgaggactccagcaacatgctgtcattagagcaactgaggacagtccatagtttattagtatatttcctttggaaaaaatgtctccccctctctctctctttaaaattcctgctttagctgcattgctgcattcatgtgcagtgactcttatgtcaaatgcctatgaggagattatgactaatttaacattttgttgttgagaggacataaggaatggtagaaggagtactagattaaggatcaggagcctggattcttgcgcaagttacgtaacttttcctagctttgatttcttcatttgtcaagtaaagatagtcatgtccctcctgtttcttggggttgatgagaaaatttatgtaaaggtactttctggactataccgaacaaatggaatgcaaaggagaagtagggtaatggaaggagcttggtgtttgagtctcacaggcctcgcccacactgtgacctcaagcaagtggctaatgtctctcagcctcaaccttttcatctgtaaaatgggaacatctatacttgccttgcaggagtgttagaaggattagaaataacatatgtaaagcactgacaaatggcaaacaatagttgaatagcaataattgttattattacacttaatgtggatatattcactctgggtgatttaggattctaaacctaaggaagtattcagtttatagatgtagagattagcaaaaggccctgctagtaactgatagtagcaactgataataatagctaactttaaaaaatccaagtaatacatgaatatgactttttaaaaagtctctgagtctagaaaggcatctgtctcctgcttacccctcaccctgaggcagccattttatttttctgcttttacttcttttggtggttacttctatttctctaaataatgttactcccatttccttttttaaatgaattttgtttttgtcagaaaggtacatgcacatagtttgccttagtctttttaaggtcaaatatcataaaagatttgtaataaaaaccatctgttccctgcccccaccctttctttacccttcctcctatcctgctcccaagggcatacacttttgatccttttaggcgtttgatctagcatttatctctctatatctaaataatatgcttatcgagatatggttttttttaactgtattacagaaattttgaaacatgtacaaaactagaaagaatagtataatgaatcctcatgtaccacccattacccggcttcaaaaatcaaaaacccatgaccagttttgtttcatctgtgctggtagccattttcccctgccactagattattttggagtaaattctagacatcattttatcagtaattacttcagcatgttttttttgtttttgtttttgtttttgtttttgtttttgcaatgtcgcctgtcacccaggctggagtgcagtggtacgatcttggctcactgctacctccacctccctggttcaagcagttctcctgtctcagcctcccaggcaggtgggactacaggcacacgccaccatgcccagctaatttttttatttttagtagagacagggtttcaccatattaggctggtctcgaactcctgacctcaggtgatctacctgccttggcctcccaaagtgttgagattacaggcgtgagctaccgtgcccagcctagcatgtacttttaagagaataaggactccttttaaaaatataaccacactatcacacataaaataattaataatcctttattattagcagtggtctccatttaactcataagttatttttttagttctagtcagatccaaacaaggacctcacattaccatactgctttttcttgactcatcagttttttgtttgtttttgagacagtctcgctctattgcccaggctggagtgcagtggcaccatctcagctcactgcaacctccacctcccaaggttcaagtagttctcctgcctcagcctcccaagtagctgggattacaggcatgcgccaccatgcctggctaatttttgtatttttatttttgagacggaggctggccgtcacccacgctggagtgcaatggcatgatctcggctcactgcaacttctgcatcctgggttcaaacgatgctcctgcctctgcctccggagtagctgagattacaggcacctgccaccacgcccagccaatttttgtatttttagtagagatggggttttgccatgttggccaggctggtctcaaactcctgtcatgcagctggttttgatcagacatcctgtcatgctttatttggccattcacaatcaataataaaagacttctttaaggggataggtctcagttcatctgtttgtcccataggcctctgccctgcctgggaagctgctgggtactggaagggtactaaggtactaagtggaagatgctttagggcacatgagcaggagcagcagttagactgagggcccttcacgtgttagcataaggaggccagtctcttactagaagccctcgatcaatcctaggcagttcattcaatttatttaaagaggcctcctgtctttggctgtggttctgcagagcttttgggccctctgtgtgctgcaggtatgggatagaggagctggctggcacaggaccttcagtggatcccttaattttttggcccttctgaatcttctcgacgcctgctgtcttcaggttcagagcctccctggggtcccacaccattccttgtctctcatttccaatggtgctttcttgtccttgtgctccaaacttcagcttctgttgtcatacctctctgaactttttctatcttccggaaattatttgaaatgaaatcccttgttctctaatgatccttccttcagcaaaaaggcccaatttgtagttcagaagacgtggtgctttttacaaaaagtatgttaatgttttaccatagactggactaagtagagtgtgtgtgtgtgtgtgtgtgtgtgtgtgtgtgtgtgtgtgtttagaaaatatttattgagtttcctattttatgccaggcactcttctaggcacttgggatagatgtattcagtgaaccaaggagacatactgttgactttgtggagcttacagtctggtggggaaacacatggaacgtgtacttataaatatgttaagggttataagaagagacataggagtaccatgagaccagtacagcagggggagctaacgtggctcagagaaaagggcgccctagggaagtgatatttaatctgaaatctgatggctgagtaggagttaaccaaaataagagggaagagcccttcaaatttgtatgtcaaagtgcagtagcaagtgagagtctgagaccaatagagagtagcaagtgagagcctcaaaccttctcctgttggagcaccaggctgtactacctcaggatagtcccttgccttctctggatctggcattcctcacccctaaaatgaggagaccacatgctcctttcagctgcaaaaatcaatgagtccaagactgtttaaagttaaggtcactgtttaagtgaaggtccatctctcccaaaacagctgtagttggaaacttatctcaagctggtgggaagtggtttgaaaaaaggcagggaggggacagtgtgatatcctgcgaacctatccagtttctagccacataatcactggggtcaggcttctcttctccttctggctctccttcagacacaccaaatcagcagtccaaaggggaccacaaagtggatcctcaggacatcgaaccctgaagaaaaagcagccacgtgtactccaaaaccaaaaaaatacgttgagcaatgtcttagtcatcttttgtgggtttgattccccatcccccaaaaatgacttaagtttctgatttcaaaacattgtgtgtatgtgtgtgtggttttttttttgagacagattatcattctgtcacccaggctggaatgctgtggcatgatctcatctcactgcaacctctgcctcccaggttcaagcaattctcctgcctcagcctcccgagtagctgggagcctcctgagtagctgggactacaggtgtgcaccaccacgcccagctaatttttttgtgttttttttagtagagacagggtttcaccatgttggccaggctggtctcgaactcctgacctcaagtgacctgctcgcctcagcctcccaaagtgctgggattacaagcgtcagccaccgtgcttgaccaagaacattgttttaagtgtaagtgtggttccttctctggggccttacaccaggattgtggtgagacgatgtattgttctcctttcttttttcctgttcttctgtattttcttatctttttacaataagcaattatgattataattggaagaaaacaaaatctacttttattcgtaaatctcaatcaatatacttctcaattaattgtctagaaaaagcatggaccttctaactgcatggcacagtgaataagtgagttggaaatggtatgacagctgaaacctgcctttgatgggtgatgagcgattgcactgtacagcagctgtgtggactagaaagtgggtagtggtggccagaatttctttattcatatactccttcaacagatatccgtcagttgctagctgatatagtttggatgtctaactatattggtggatagctgttggatgtcatgttgaaatgtgaaccccagtgttggaagtgggccctggtgggaggtgtgtgggttatgcgtacagatctctcatgaatggcgtgatcccctccctgctgtaatgagtgagttcttgttcggttagttcaagtgagaactggttattttttaattaaaaaaaattattttggccgggcatggtggctcatgcctgtaatcccagcactttgggaggccaaggtgggcggatcacgaggtcgggagatcgagaccatcctggttaacacggtgaaaccccatctctactaagcatacaaaaaaattagccgggcatggtggtgggcgcctgtagtcccagttactcgggaggctgaggcaggagaatggcgtgaacctgggaggcggagcttgcagtgagccgagattgcaccactgtactccagcctgagactccatctcaaaaaaaaaaaaaaaaaaaatgcaagggactacatgtgtgcaccaccatgcccagctaatttttgtatttttagtagagacggtgtttcaccatgttggccaggctgtcttgaactcctgacctcaggtgatctgcctgccttggcctcccaaagtgctgggattacaggcgtcagccactgtgcctggccctggttgtttaaaaagaacctggcacttctccctctcacacttgctctccatcttgccatgcaacattccggctctcctttccctctaccatgtctaaaagcttcctaaggcctcaccagaagcagatgctagtgccatgcttcttatacagtctgcagaactgtgagccaaataaacctcttttcatcataaattattcagcctcaggtattcctttatagcagtgcaaacggactaacactgcgtaacaaattaatcaatctgtgcctgtgattttctcatgtgtcaagcagggataataattatacctacctcatagagatccttatggggttaaatgaggtaatttatataaagcagttagaatacaaccaggcacggtggctcacacctgtaatcccaacactttgggaggccaaggcaggcagatcacttgagctcaggagttcaaaaccagcctgggcgtatggtgagacccccgtctctacaacataaataaataaaataaacagaatattacctggcatatggtaaatatacaataatagttttggggtttgtttatggatttccttattttaataagtatctcataatatgtacaaaatgctgctatattagacacagatcttttccttaaaaagttaggattctggcagagaaaaaagacctgcccccaactaaatatgtgtcatcagagaaaagggtatgtttcttaagagagaaacagagcatactaaggaaattcagaggaaggagagaccccttctaaactgggggtaaaaggtggaattaaacagccaaagtttccttcatcctcaaatggagctgatgctgctgtctgtgaaaaacagccaagtttcctgaagggaagccctttaagaggtggtagtgcaagggggttgtggattcaggactggcaccacatggtccctagttagagtgcaggctctgccccttgctcccgtgagcctttgagcaggttggtcggctcaccatgcatctgttgctacagctgtaagatgtgaatattaataatgtctcctgcacccgattattgtgaggatgacatgaagtggtgttcatagagtgctcagtgcacagcttggccccagcccacataagtgtgtccagtattgtcagttataagaagaaatgaatgtgccagtgttgctatggttctgtcttccgggattctgtcacagacgtagaattattccgttcacaagggaagtgatacagagtacatgttgttgaagaaaatgatgttgtttttatgaatgggctccttactattatttttgttcaagtaacaaaacatgattcaaagcacccatcttcaagagcccagcctcatttcctgacacctactcagtcttctggaataaaggctcagccaaacaatagccctgacctccagtccctccaaactgagtgttgctgctgagaacaggccttacagctctgggtgggcttttgttcattactcatcgtgacattctggagaaatacaggacccttttgacttcccgaccaatctctgactttctttcattgtcacatcaccattagggcaaaggatgatgaaatggtcagaattagacaagaagtattcaaatatttttcaatgtatagtatgtgccaggcacataacccacacaagaaccttggagagtaaggctgttattcttctcattttacactgggaaaccaaagcacagcaagaaggtctagggaccagaaggaagcccacatctctctgagctgtgaacggctgctctctgtgggttaccaggctggtgtttttttgttttgttttgttttttgttttttgttttttttttaaagacagagtctcactgtcgcccaagctggagtgcagtggtgcaatctcggctcactgcaacctccatctcctgggttcaagcaattcttctgtctcagcctcccaagtagctgggactacaggaacacgccaccacgcctgactaattttttttgtattttagtagagatggagtttcaccgtgttgcccaagctggtctcaaactcctgagctcaggcaatccacccacctcggcctcccaaagtgctaggattacaggtgtgagccaccgcgcccggccaggctggtgtggtttttattccacagcagtcctacgtcacattgtcacattgttgaaaagccttcagattgacaaactccctcctaatatagcctgttttcttggatgttttctgataagcatctgtgttttctgagaactaataaaaattcttgttaaaccacaaattaccacagcctcttccttacctatagagagccgctttcccagtaaagctccggtcctaccttcccatcaccatcaaagtggcattgaaacagatcagatctgctccttttgagggagttagttgaagcccagtcttgcttcaggccacacaggatttgggtagcaaagcaaggaaagcagcctctctgacctagtggcctgagtgtttcctttcccaggctggctgcggcaaccactttgagaaatggcattggcattggcatgtgtgtggcatgtgtgctgacctagttaggagttgaggcttcatttctaattctgtccctttcgttttgagctgtgtgaccttgggcatgtcacctaacttctctgtatatgtcttcttatccaggaaggagagattaataatgtagcctcatagcacttatctgattctcctaaggatgttatgagaatcaaatgagattatgtacaacgagagcaaacatttattcaatacttagtatgtaccaaatactttcagtttccttacatgtgttttttaattctcacaatcctaaaacagaggcactagtatcccacttgacagttaaaaaaactgaagttcagagaaattaagtcagacaggactcagatccacatctgtggctcccaaatgatgttcctaaccactatgcatgtcactcgctccccattgtacacgaaagtagagagatgttctttgtctttaccatcaagcactctccaaatgcaagaaatgatctctcgtaaccactgctgttccatgttggtccctaaggacacttatagcctgttacttgtttgtcttatcttgtagtttatgctgctgcttttcatgtccctaaggacttgttcagtgaattcttttggttttactcccagagaatctgttcatctccttcataaagggggttaaaggtgcccagctgagcctggcatcttgggcagtggcctctgacttctccagggttcttccttccctcaagcatgtagttgggtagcttgtagtaaaatgctctataatgcatttgtttataagttccccagtcactgatttttactcattgaatctcagaagtggaaagcaccaaagccagcattttgttgatagggaaactgaggtccagagagggatgtgacttgcttgaggtcattcattcagttgaaggcctgaccaagactggaacccagtttcccaggggacacaccagtgctgtttccaagccttccccgggggcacacatcacctcccctacatgaaggacaaactcatgtactgtgcccagcatgtacctaggagacctgggagaaatgaaacaacttggaaaattgggcaggaagaaagagatgggtgtggggtggggtgaagatctccaccctaactagtatattatataccaaagaaaggaattaaacacacaggaaagcagacaacccactaagaagcaaaggaatttacccaggaaccctggctcagtgagtggataggaagccttttgtcactaaagctgcagggttgaaaattgaaggaaggatattaggcaagcgtggtggcctgggatgcagttacagccccctggctcattgtccaaaggaaatggatctctcctgtggacagagaggtggaaactgagtgagtgagttgtgtggttgacatcatcaggctgagcattggattacaacaaatggggacttacttggcccgagacatgggaaacacccactaaaacctcaaagtgcttttcatttaggagacacggggaagagacagagaggagggtaaagtgagaatcctgcccgcaccacaggtctggactgctaaccttgaatcctggtttcttaaattctgcctccgcttctgactgaggaccactggattttgaggaaactttggtcttgtaagtagaactttactctcctcccctgcccaacacccccagggagaagcagagcttggaggcagagctctctggagagcttgctttccagcctgttggccacaaaatgtctatttttatataatgatatatgtgagcttgctctgaaaattatggccttgtctgaaactgcctaaggctagtcggagcctccagtctcacaaatgggctccattcagatgctgtttcatttttactcaaagaactttgacagagtattcagagctttaaaagcagctccttgctccaaatataggtgaagaaataaatcttccctaagaaattcgtgtttgtaaaaccctttctttttttctgattacaaaggtggtataataatttttaaacattctagaaagaaaagtctccgaaagtagtgaaaattccctattatcttccccctcaggaacatggttgttgtgttaaatttcagttacagatatggtcagactccatgaatttaccacatataaacccagtgctgcagcagctgtgtggaaaactccaagatggaaaggggttggaaatctttaaccttgggtttgcgatctttttattgcttccttttaaaaatttgctgtttatgcctggaatataaacaggacatgtaagcctttaggcattttatttgttggtatctgttttcagggtttgaaactaagcaagctactctgtagagagggaaagagggggcccttgctgtacccaggtcccttacttggtgggtccctgaactgaggaggattcctaggtggcttgagatggcttgcagtgtgctaacaggggaggtgtcccctcttagcaggttaagtatatttgaaaagttacagctaacgggaagatttcagcttcaacaaaaagctaccatatattagaagggtcacccaaggaaactgtcaccttgggcaagtgtttcacactctctgggtcttgtttctttatttgtacctaatgaggggacaaaactagatgatctctgtatttccaaattcagtatgaaatgaactgtccatatttcttttccctttgtattgggcccttatggctttaggagcaaaggaccctaggttttcagtttcccagagtagctaaaaacgggtgcctgtaggacagttaaaagaagacataaaacaggcaacattaagttacttctgagtttttatgggtctttttcagattaggtgttcttgaagaaagagaaagaaaaagtctcagtggtaactgtatgtgcacacgcatacactagcacatacacttggggagagaggaaagaaggaattggcattattgagtatctcttaagcactaggccctatgttatgctcaaccctttacagagcactagatggtcagtattattccctaaccccattgactgaggacaaccatctacttatatgttttcatattatcctgaactaaactgtatttacataattactggcataacttcaattccccatgtctccactagaccatctgcaccttctctgcgtgtctgtctagcccatcactatgccccactgcctagtagaaagcctggcacataggtacaaaggagacacaacttaatttaaacttaaagcccgccatcctagttcctcatttggcaagaaagagggagaagaagggggaaaatccctctatttgcccctctttcatcatttaacatagagccaccctctcctgccacaagggaaggatagccacagccagagtgcaaaaaaaaaaaaaaaaaagcaaaagacgtcagatcttgaattttgagtttccaaggtgccgggtcttgacaaattaaggtttttgctttgttttgttttgtttttgtttgtttgttttgttttctttaagggcatcagagaccctaatcctcaggaagttgtggtatttagaaactatttgtttgaattaaggtcctagttaataagagggttctcaaaggcccttggcacttctttttttttttttttgagacggagtctcactctgtctcccaggctggagtgcaatggtgcagtcttggctcactgcagcttccacctcccgtttttgttcaagggattctcctgcctcagcccctcgaatagctgggattacaggcgcctgccaccacgcccagctaatttttgtatttttagtagagatggggtctcttggcacttctaaagctgcagtcttccccagcatttcatcccatgaaggtggactgttgctgccatggacccacccatgggcatgggcagtgggaaggccagggcatcctctgcttcatcccagccccgctgggatcttgagatttggggtaatcaaaaaaggcatcctttttcctaaggtggtggtgaggaggtgatgttctggaaggaaggtacctagactttgtggtccctgccaggaagtggagagtggaaatgtggaatgcctcacactcctcaactaggtaggccttcatgtaccagatgagggtggctttcagttcttgttttgtgtgtcaaagttgctcctgttatcagtgtgtgtttgctgatctctcccacctcagtcactcccggcagtgagtttagggcatcttgggagtggaggtaggttgtggaaaagatgtgtccagagatctcatttggctttggtatcttcctgaaataaatgtcacacacagggctgggcatcttgcatatgctgacttctcttaatcttcacagcaatgatgtgaggcagagatcatctccattttacacctaagaaaggcacagagaggtgcagtggattgcccagagtctcacagctggcaggggctagagcttgagttcccaatgagaactggttgtccccgaagcccttgaatatttcaccatactgcagtgcctttttcatatcacctccctggatctcagttgctccatctgttaaatgatgacaagtgaactctagtcagaagtcagagtggtgttttgtttttaatttgaatgcctttaggcaggtgtgttctccagttcattaccatttgcgcattcccctgtgccctctagtctcctgcctggcccctggcccctgtgggaatttgcagccctgcatctggttggtgtctaccgtttctttcgatttagacaatctagagggcagtgagaaattggaaaggggtagcaggtaagagctctcgagttcagtgagaaattggaaaggaatagcaggtaagagctctagagttcagtgacaaattggaaagagatagcaggtgagagctcttgagttcagtgagaaattggaaagggacagcaggtgagagctctcgagttcagtgagaaattggaaggggatagcaggtaagagctctgctttcaccgcctcctagctgggagatcctggactgatcacctcactttatagaacctacttctctttctgtcaagtggggggtcacagtcatactgacctcaaaggggtgccatgcggatgaaatgagatagggctcataaagcacttagttagtacaaaaatacatgcttaggattagctgctctcaatttccagaaagagaatgtcagccaatgtacacaggcatctgccccctcagacataggatggcatttgcatgaggaaccagaagttatctttgaactcatcattttgaaacccctgtgatgaaccctggagctgccatgttggctcttcaaaccaagcctcagcattatttcctgtcacccagtcaagtgatgctgaacctcaaatcagccagccagtgctgaggccaaaagcagaagtgggtgctattctcttgggaccagaggaccctagcccagccacttaaggaagaagctggtaacaggtgctggctgtgacagacaagaagctgaactggcccaattaactctgccaaatgctttcacgaggggccagaagcaattcctaagtggagactgaggtggaaaatctaaagttctgggaaacaggttattaatcatgaccctaggctgagctcactacctcctggaaatccttcagaaatgtcttaggaaaacttggagtactgctccttcaaagagtggtttctttggaagttgccgtgggctcctatgctgactgattatgaattgcagattagaacacataatgtatccgctcttactggaggaagctgcatttccaaaaagaagtctctttaatgtttcaagaaattacaggctttagcttgactcttcagaactgaataatggcccttcatggcaccgaagaaagtatttggtgtattcttactatgtcccaggaacctaggtcagttactgttttagtactttatcagtgtagtctttaacattccataaatgtacattgaggacctgttagtactaagcactgaactagaggaccagggtaaagacactgcctctggtcttgtggaattctctgtgcaacaagggaagatagacagaggagtgaataattttaatggcacgtgaaaagtactgcaaaagaaatatgcacaagtgctacaaaacaccagacactggatcagcatattgtggaggtcctgatcttgcgctgggttgattccttctgctctctccctacaattcctggctctgggagctttgccagcatttgcattagggagcaactgagagctgcccctgctgaagcactcatttctggcaccttcctatcccccgtggcttcagaggggtggaaagaacacttccttacaaaatgtatgggccccacctgagagggccctgaatctgaagtccaaagttgtagtaaggaaacagagggacgggtgacttttgtagtctaaaatcaccactgattttccgttggtttgtttttataacatttattgtggattttttttttctgattgcaaaattagaatatgttcaagggaagaaaagctagatagtacagaaaaacacacttaaaataaatcatcactcagtgatttcacttctctgtttttgaataagggcctgtctcccaatccccccacccacataccgctgtatttcaagtttagctctaattttaatttctccctgggcaaagtctcatgtttgtttgcatatctcaaaggtgcttgtgttgtgggctccaatcactactatctgcaattggttagagcctgcggccatcatttatactttcctggacgtgtgtgtagattcatctactgctaagaaccctttatgtgttaggcattatgcaaggtgcggtggggaatgtcgaggtaaataagactttgaggttgctcatggccggataggaaaaaaagactcagataacatgaacacattgtgaaaatgtgccccaagatggggacagagtcctgtagaaagcctaagagattggaggagcagtagcatttgagctgagccttcaataaatttttcatgtatttagccaatatttgttgagaacctaatatccgccaggcactgggcaaggtgataggtggatgatgttaaatataacaggcatggcctttacctgcatgaagtttacaagcacaaatggtggcgttaagaagtcaataagcagggggagtgaaagaggagagtgtggctggggtcttccttgaaaaggtggtattcaaactgagaagagggctgggcgcggtggctcatgcctgtaatcccaacactttgggaggccaaggcgagtggatcacctgaggtcagtatttcaagatcagcctggccaacatggtgaaaccccgtctgtactaaaaaaatacaaaaattagccgggcgcggtggcacgcacctgcagtcccagctacttgggaggctgaggcggaagaattgcttaaacttgggaggcagaggttgcagtgagctgagattgtgccattgcactccagcctgggtgacagagtgagactttcaaaaaaaaaaaaagaaatggagtcacttataccaagagtaaaggagggagagggagtaaagaagggtgctggattattccttcctttgctcattattgattctaaaaatctcacttattttctgtattcagtttcctttctattggagaatattcttggggtctgtgaatggtaaacttgcccagtctttgtttgaaaatatcttttgccctcacacttgatatgttagctagatatagaattttttgcatagcatgtgtaatgaatgtgaaagttatacatgcctctttaaaagttttcaatcaaaacagaaatagataatgtacaaagtgaaagtctttcatttcttttctcacaatttctcaaaagagaataatttttttcaaaagagagaagtttcccagggggaaccattggttacagtttgcccttttctatatatactgaaaattgtttaaagtgtaaagtatgtatactttttaaaaatgtgcacgtacacaaatgctgtactttttttttttctaaacataaataatcatgttcacatttgagcaggacacagtagttcacacctgtaatctcaactagtcaggtggctgagagtggatgattgcttgaggccaggagtttgaggctacattgagctatgattgcaccagtacactccagcctggggacagagtgagacctggtctcttaaaattaaaaagaaaatgtaaagttctttttttaattaaaaaatgataatatatgcaattttacaatatgctttttaacaatcaagcatgtacttttttccacatcagtacaatgaaatctccttcattctttgaagttgctgtatagtttctcatgatattgatacaccataatttaactatttttctattaatagacatttaagttgttttcgccccttggttttgctactatacagtatttcactgagtatctttttacttaggtaaatatatctgtagtataaattcctggacatttcaggaatgtgacgtgtctaggaatttgaccccaaaggatatgtatgcacatttaacaagttaatagatattgtcaacttgtcttcccaaaagattgtttcaatttataatcccagagtatgtctggctctaatttttgtttttcttctggttccttagaattcccgtactgattagtcaacagtggaaaatctgaagagatgcaagcaggaaaaagaaattaaaccaggtaggtagtggcactgttcatactctactgccagagcagcacacgtttttgcctgaatatctttatttctggttgaaggaagaaaatacgtaagttccaaactaaattagtgggagattttgaccttatgaagaaaaggcaggatggctcttttcagaagttatatacataacagcatgctacaatttcacagtcaagattctgttttcaggcgttttttttttaatagcatcagaaagaaaatttacctttggtggcttaagaggggatgggtttcccggccatgtacttaagcttaagcaggtggaatcatacacaggagttattagcaacattgggcctggtgccagctttcctctccaccaagtgtttgctgtaaagctgttttcacaaagaccagggcacattatgggaattttcattttaatgctgtaatagaggagcaaaagccagcaaaacccaacccaaagaaatgggttcggcccagtagtctggtgagaagggatgaagatgcagtccctccagctgagaacaaattgccattcaaagagcacaagtggcccacctggcagtatggccaccttgggtccagtgtccatagtttatgatatctaaatgtttctggcataagttaataattttaaactcagggtaacataataatcgactttttacctaaagcagcagtatttatcaacaaatctggtgaatttctttgaattgtcaagttggaagtactgggtccacagagatcttttcacccaccaggcatccatcagcatccatggatgtggttgttaaggtatcagaattgaaggctattctagattggcctacacccacctggaccttctccatagctggaattttcacaaagaggctaaagagcctggggatgagcgcatcgctctgaagagcttgccgaatccactgtgcatctgtccataagctaaggatggtgtgaggactgaaagctgcatgggagagagaaggtcttgtgattttctctctcttcagcactgtagggggcacattgcagctgtgtctggtgcagctcagtttagactcctgcctcagccaggaaaagtttttttcatttttacattaatttagcaggtatttatggagcatcttctataaattggacaccagataacaaagcaaaagtggcacagtccttgccctcaggaagcttgtgggtctggctgacagtagactagtagcagtagtctgcggtaggtccagagggctagtgggcagagggtgctgcggcttgaaaggtatgcaggagatgacttggagaagagtgggcggggacaggctgggggcttgcggagcagcacagcgaaggcctggaggcttggggggtgcagcactccatggaaattccatgggccaaacacagtgcagagggggttccctggctggagttgagtctggaggtgtccatgaatgaatctgaactttatcctgatggctctgaatggaaagtcgctggagggctttaagcaggggagagttgtgagtcaggcttaggaaggagactgtctagcttcagtttgggtaagggactgagagagttctaagggactgagagagttccgcactctgcctggcccactctcatcacctctcttcttagcgcctgtgctcctccttcccttggaacttcaagaaggcaaaggacagagcccgaagtctgagataagatagactccttggggagaaaagaggaagtggtgctgggtgggtgggtgggggcacccagtgtaaagcagagtgtacaggttgccttggacaagtcacttcacacctatgagcttcagcttccttatctattaaatgaagataataagtattactcttcttttctctcatctcatgagatatcatcatgatatcttaaaatatcatggatattttacatgcccagctagggcttccagagaaatctctctgtttcgtttgccatgtaaggatttgttgaaatcctcaagcgcacattaagtgcatcctgtcgctgcagcttatcgcctgggatgagagcagtgaagaagccctagcctcaggatcagtctcacagctccctctccctgcagccaagaaggaccggtctacagaggggagggagcaaacactgaccgaaggccaggtgtgtgcttggcaccacccacagacaaaagagtgcttgggcagagctgctagaactattatttaagccatgtgccagatgtgataagcacttacatccttctcagcctcatttagtttgatcttatgaagtacatatatattatctccatttgatagatgaggaaaccgagactcaaagaggtggaactgcttgctggtagtgacacaattgggaagaaggagaagggccggagtctggagttcgtgctctctgacttctgtgggtagcatctgccattctgctggtgctccttcagacctttcagacagtgcagaggacacagaggaatcaagggacagctgttctcttacaaaccttgaaaatcctgtacagagccctcagataaccaaaacgtggtccagaactgaatcctggggccaacatgcccatttagcacttctctcaatcagtccttttccccaggtgcattaaacagggcagctgccttcccaccctatgggcaaactgcttggcagctaggagtgtgcctgctcatctcccaggctgctttcctttgcacctcagcaaggagggcaggccgtgcatccagggaagcacatagttactccttctgccagaaggccaccccctaatctggtttaccgtggacactgaagtcactccctgtctcctggccatgaggaaaactcctttgagaggagcctctgaagccagtggagagagtaaaaagtgagaatcctgcctagttgaacaggcagttcagcctgttctggaaagagttaaggctgtgtccataccaagccatttaaagaatctgcccagtagaatcaatattgtcaaaatgtccatactacccaaagcgatctacagaattaattccattcctatcaaaattccagtggcattgcttacagaaatagaacaaataatcctaaaattcctatgaaaccatgaaagaccccaaattactaaggcaatcttgagcaagaagatctaagttggaggcatcacacaacctgatttcaaatattataggctggacatggtgactcacacctgtaattccagcactttgggaggctgaggcgggagttcgagaccaacctgggcaacatagcgaaaccctgtttctataaaagaaaaaaaaaaaatccaaaaagtagctgggcatggtggcgtgcacctgtagtcccagctactcaggaggccaaggtgggaggatcacttgagcccaggcatcgcatcaaggctgcagtgagccgtagtcatgccactgtactccagcctggctgaaagagtgagattatgtctcaaaaaaaaaaattataatgctataataatcaacacacacacacacacacacacacacacacacacacacacacacacacgactattactcagccttaaaaaagaaaatcctgacatttgcaaaaacatggttgaacctggaggacattgtgctaagtgaaatagggcagacacagaaagacaaatactacaggatctcagttatatgtggaatctaaaagagttgaactaagagagagtagaagggtggtttccagagagagtagaagggttgttggggaaatggagagatgttgagcaaaggttacaaacttgcagttataagatgaataaattttggcgacctaatgtacagcatggtaattacagttaataatatggtattgtatacttgaaatttgctaagagagtagatcttaagtattctcgtcacaaaaagtaactgtgtgaggtggtggatatgttaattagcttgattgtgataatcatgtcacagtgtgaatatataacatttttatttgtcattcataccttaataaaactgaaaaaaatttaaagaatctgcccaggtcacaggaagccatcagtcataccctgagctgttgtgtaagctcaaagagtatggtttatagcatatggatgagtgctcttgtgccaacgctgggctaaacctttacatccagtgtctaattaggtagtttctgttattatccatgttttaccaaggaggaaactgaggcttttggagattacatcatttggccaatgtaccagagctggaaagttgcataactaagatttcacttgagctttttttagctccacatcttctattttttcagctacaccaaaacgacttctttaatttagctttgcttttctgataatagtaaccaccaccctttattgagcatcttgtcatgtgagccaggcattatacatccattatttccaatcccagtagaaccttacaagtaaagtatcattgtccccgtttcacagatgaagaacctgaggttcagagaggtcaggaattttgcctcacagatttcatctgagactagagtgagctctcaactatcatcctgtacttccttcattccttaccttttcaggttcctaggaggaaaggactcaaaaaaattatgcatgaatttcctttaatttcacaacaaccctaagggttgggggttgatatctctgttttacaaaagaagaaactgaggctcagagatgttaagtgatttgctcagcgtcatgcagctagcaattggtggagccccgattcatacaggctctgacccatagcttaagcttacttgcctcccccattcccacccctcacccctcttcggctctgtctccttgcaatgggggcagaaaatccagcctttatttctccaggtcctagtagtcctgggagtctgggggatttccagctcctttgaattcccttttttggcctctactctgcctccagcacctctcttaagagtccttttcactgttgtcatagcaagggtctcatctggagggaagctgccttgaggttggaactatttggctgcttatcagcaaggcttcagggccttgccatagcaactttccaagccacccatcttgtgacctgttctgactcagggcccctgggaatcccctgggtgcagatgtttgcagtgactaggatgcagcagtcggctcccaggactctttttctggccaaggccattttaggaaggcttctgttccagctgtgctgggagagttgaggtccagagcctccaaaccttaagaatgcagggttatgtgatgtctagagctggagtttttagccaggggcttatgggttaagagccccctgtgatcataggtatggttacacacacacgcagagaatatatacttttctgggcaaagtatctgtagcttccctcaaactctcaaatgtgtctgtgacccttaaagtttaagaacactggtctagagagaacccaaagtgttgtgggccactgtgctcccttggccaccagcctctcagatgccagaatcttgagagagcacaccaggcctctagtgtttctgcttaggcatgaactgggatacagtatcaaatattgctgaagttcacaattataactataaatgtacagctgtcctttgggatgccccaagtacttttatttatttatttatttttttgagatggagtttcgctgtgttgcccaggcaggggtgcagtggcatgatcttggctcactgcaacctccgcctcctgggttcaagcaattcttctgtctcagcctcctgagtagctgggatcacaggcgtgcaccaccatgcccggctaatttttgtatttttagtagagatggggttttaccatgttggtaaagctggtctcgaactcctgacctcgtgatccgccagccttggcctcccaaagtgctgggattacaggtgtgaaccactgcgcctggtgcccctggtgctgtaaaagtacaactgtcctgtggatgccccaagtacaaccacgaaaatgcatgcccagcaccccaaacatgtcaacatgtttgaacatagtatattcaccccataagtggtagccaattttttattttattaaatattaaataaattaattttaaacacatttttgttttgttttactcttatcattgttattatttatttggtcaggagccaggaatcagatggttatttagtcactgagtgattaaaatctatatgtcaggagctgtgctatatttcaaagatacagtgacaaacaagaaaggcagggtacctaccctcttggaatcagttggaatggcagataatgaacaaatgtatcagcatcatgcctggctcacgggacatttctgtgtgtatttgtcgaatgactgttgaatgaatttcgactgagtcattattaggaagaagtcaaggtgctgcaggtggcaggcaaggaaacttcatctcttctggtgggtcagggaagaggaagagggactcaggctaaagggcctacgccccaggctgccaggaattacacaggactgtttacagggggctggcattcccatgaagactggaggtgtggggggagggctggaatactgaacaaccaagggcttaggaaccttgagtaaatgatgttaatgtgggccagaggtacggatgacatctacactctgctcaagtagtgatggtccctggcttgcaaacatgttgctcttccaggttccaagggaggctgttgttcaaccggtatttacctatgtagcaagttctgggttcggaaccctacttctctcaggaggcaggaaggatggaaggacatccctcctgcagctgaagacggcagagccccagccactgctggcagtggccgtggacacacagtgcagtgtctgagcagtgtgtgaagagactcccttactgtctgaagggcttcactcaccctacactagtgagaagcctctgaatattgtcttggaagggaagcattcacatattaagggtaaaatcaaagtcagagcaaaatttaaagtctgctctttgcccctcaagaccctgaaagtccccagtgactgtcattccactcacctcctctcccattcactgctccccagccccatggcctcttattagtctttctgggcagcaggctccccttgcctcttgcatgctgtgccctctgcctcgcatacttagatgtatatgcagaagtggtttctaaactcctctctctcatcatgtgtgtgggctgtgatacccaaccatcagtaacagcagctgatgaggacagtgatcattagctagagagcacaccctcagtcgctccacccagcattattagaataataataattccccaccaggtccccccacccggcattattagaataataataatcccccaccagatccccccacctggctttattagaattactatgagaaactatcctctagtgattctgttaattgtgatttttgcccccctactaccactggttaagaattacgggcttatgaactgagctccctaactagaccatggacttccctcaggggcacaatggtatcttactgtttttgtatctgtggtatctagtcccaagcctagtatacactgagggatcagtgaaatttttctgaaggaatggatgaatactatagagataatatcttgcttcttttcattctccacggtgtattttggagatgcattttatagaattagaggaactagaattgacacaaactgtcttcaacccatgaaagtctgtgcttccatgaaggtctctggaaagcagcagaacagtccatctggatcactgcttggtggctgggcatgctgggtcctccccgggcctcctgctgcggatgtatgatctaaatttgccgaggctcagctacacagcaaggttctcagagagtggcagtctccatcctactgtgaaaggaggggcagttttccaaggacttccttgctttcctgcccttccttcagagctagaagactcttacctcccttaccccagagctagaagtaacattagagattgcttcagttatccacttctgcataatccatcacccctgttactcagtggtttaaaacaacagcaatagtttcttatatctcatggtttctgtgggtcaggaatttgggaacagcttggctgggcagttctggcttggatcttttatgcagttgcagttagatggtggctggaactggagcagcttggggccagcaccgctgaaggctggccggctgctgctctttcctggccgtctcaggacctctcccctgtggttacttcatagggcctgtttgggcttcctcacagcacggccacctcagatttcccatatgcagctcaatgctctagaggcaggtttccccagagagagctaggtgaaagctgtataaccctttatagcctcatcttggaggtgacacaaaatcatttttgttgcattctatttgttagaggtcattaaggccagctcgttcggggaaattgaaattaaactctacctcccgagaggaggaatgtcagataatttgcagacatgtttcagaaccaccacagagatacccagtttcccccttcattccacacttgagactcccgaggtttgaggggaagagccttgtccagaggtgcccagcctggcatgggcagacctggagtgtgacccagcccctaggcctttggcaggcctgccaggaagtgatctcactttcccttccttcctgtcccctcacagtaagatagagactgccactctctgggaaccttgctgtgtagctgagcctcagcaagtttgataatacagacacagcaggaggcctggggaggacccagcatgcccggccaccaagcagtgatgcagctggactgttccgcagctttccagagacctccatggaagcacagacttccatgggttgaagagagtttgtgtcacaattccagtccctagccctggccctgtgtgaagtagtaacaccgccctgccagtaggatatagctgctgaggaggtaagagttttaaaaaattcataccccaaaataattatttttactcttgctgtgaagttagataccaaagagtagaatgtggtggtagaatcaagagagtcaacccaacatcactgaaaagattctgaaggtttgtatccagctgaatatccaaaacaggatgttgcttaagcatgggtaaaatgcatctggtgtatgttttagacagccttgtactatgttttccagggacttgcttactttcttgcccttccttaagaaatgccttattatgaagctgggggcaggggaaaaagaaggtcagaaaagggaatgggtacttttcagtaaatccatactacatgccaggcataatactaattcactcccctgctttatagcctaatagcacaggctccatctggctccaagctccctaaccttgctgagtttcagctgcctcttttgtactatgggataatgatactttctgtcatagagttgctataaaattaaatgcttgtaagatgcttagcacagtctggcatgcagtaagaaagaactgtgtaacaggccaggcaccgtggctcaagcctgcagtcccagcactttaggaggctgaggcgggcggatcacaaggtcaagagatcgagaccatcctggccaacatggtgaaaccctgtctctactaaaagtacaaaaattagctgggcatggtggcgcacacctatagtcccagctacttgggaggctgaggcaggagaatcgcttgaacctgggaggcagaggttgcagtgagccaagatcgcgccgctgcactccagcctagtcacagagcgagattctgtctcaaaaaaacaaaaaacaaaaaacaaaaaaactgtataactgttggctccaattaatccccacagccactttttaagacaagtgtgagccctcccattttatagaaggggtgtctgcagttaggtgaggtgcccagcatcatgtgccactgtagggacagcagctgagactctgaagtccttgtggcatccaccacaccacattaccctccgggcagctctgccagggctttcctgacatgcaatagttgggggcagaggaactcaggaggctttgtgccctacaggagccccatgtcaggtcctagagcaagaacatttgaaaaaccaaggccaggaatccatttatccacttaggaggctctatagggagcagggttacagagaatgttgtacacagaggaaatagtctagtaaaggctttgaggtcaggaattaaatgaggtttgaggatttaaagagaggcccagtgtgaccagagcaaaatggaccaagaagagagtagaaatgagacaaaggctcatctgcagaggcaggcagggccaggtcaatgcagggcttcagggactggcatcaggagagtggatttcactagatgtgaaatagaaaagcatcagaagttgaacgaagcagggaaattccagtgatccaatttccattttgagaacgttaccctgcctgccatataaaaaatagaccctgggctaggggtgagagagacacaggactctggtcagggtctctgctcagagtcctggtgagacattccggagcctgggtggtgcatgtggaggagagaggtcagcagattcaagctctgttttgcaggtagaaacaaaaggaccaggctgggcactgttgctcatgcctgtaatcccagctctttgggaggccaaggtgggaggattgcttgaggccaggaatttaagactaggctgggcagcatcgtaagaccctgtctctacaaaaacattaaaaaaaaaaagaagaagaaatgacaggactgggtaaagaattgtccatgggtggtgaagaagaagcgaggtcagggatggtcctgggtttccagctgggcagatggtggtgcccttgctcagttgggaaggccgtggcgagcaggctggtgacttgacgtctgaagcttgcagtgctgtgggatagccaaatgacacgctcaataggctgagtcagaaatctagaactcttaagagagggttgcagctctttgaaggtcaccaacatagattatttcgggaaaggataagagcccctcgggagcaaacagaagagactggcgtcctaacacaaaggtcccggcagtagcaggtgcctgtgcagactggttggagggaggcccaaagggtgtggtgtctggaagtcccatgaagagaatggtccgggaagaaatgagttggaagaggaggacagaaaggtgtccctggggataggcaccgtagaagtcactcaggaccttgtctgacttgagcaccctgaccttcccttcctatcactgcctgcatccaggcctgcttgggtctaggcctggcaggtgcagaggccaaggcccggcctctctgcctccaaacaaagcctcacccagggccactctttgaatggcaacaggcactgcccaggcaggcgacaggctcctctctggtgaccttgtgctggatgtgccccaaggcgctgggtagggctttgcagccagccccaggcaggccacacatggatagaaccggcagccctcccttttcccaggttcttggaatattctcattttggggctctgagttttctgttggcctcagtgcctctcttttctggctttctatcacagagagaagccgctacccttgaaatttgatgaatgcctgttcagtaggccctggcatttctgtttccacggccctttcgtccctcagagaagccttagagagcattttgcccacccctgataaaacttctcccataagaccaggtcccacttctgtgcttcatgtcttctgcaaaagtctgtttgctttttgtatggtttctgcaaatactgaatttttgaaaaagaaaaaaaaacaggaaatgacctttctagtatatttggaaaacaatttggagcttgtaatggaatctgcctgagcaatgaggactaatagctgcagacttggaacagaccatgtagctcttggcagagcctggggcctcttcagtttacaaagctggggggagtattagaaacccacgggagaagtggcttcctgtggggaaatgcccagagcaggcacctgcaggcactgtaacctctgaccccagggccccaaaaggcctggggacagagtataagggcttcaccctttgtcctgggcattcaaggtcaatcacatgtctggcaatcatccagatcccacaagataccaaaacctcctgaggatgaggaaaagaaagagcttcattctttagcaccctgtagggctcaggctgagctagaagattctagattgtttttagactcaaattgcctgttggctctctgggtccctctctatccaacttttctgtagatttcagcaaaaaccacctcctcagagaggcctttcctgatcatacagccattaactgcatgatccacatgcagagaaccctctcctcttctcccatagcacataccataatctgtgataagattcatttacttgtgcagtgcctttttctctttacacattgtaaatatcttttttagtttccagtatataccctatgcccggcacagtgcctggcatgtagaagttgctcagtacattgaatgaataaatgaaatatcaagactggaagacttggaggccaggtgcggtggctcatgcctgtaatcccagcactttgggaggccgaggcaggtggatcacttgaggtcaggagttcaagattaacctggccaacatggtgaaaccccatctctattaaaaatacaaaaaaaaaaaaattagccgggtatgttggttcatgcctgtaatcccagctacttgggaggctgaggcaggaaaagcacttgaaccggggaggtggaggttgcagtgagcagagatcatgccactgcactccaacctgggcgacagagtaagactccatctcaaaaaaaaaaaaaaaagactggaagacttggagatcatatttcaaacttcattatttagatggtgggaaaggaagctgagagagaaggggactcatcaagggtcaccctattgcgcgggtattgaaccagatcttcagccactgttatgatgcagggccgcacattctttgctcttctttccctgtaatctagaacatcttctattattcacttgttcatcagctattcattgagcttcaagtatgtgcagggccttctggacgtaacagtaaacacaccagccagggtcaccacttctggggaatttatattcttaccacacaacaccataaagcaccaaagaaggaagttttaatcttctgtagcaccgttaaacagagtaaaaacaaaggagctgaatgaaatgtccaaaggcaggttttactaactcagcccccaaatgaaccatcctaatcatttattaattgcattccacttacattccccatcacttactacactttttgcatcaccatcttattgaatcttcataacagccccctgaactgcagggtgtgactgttagccccgctttgctgaggtgaggggagttgtgcacggcccacagctggtaaacaacaaagctgggctggacgagcaccctagatgccttctaccctgccacccattcccctcagagatttgtaatgtcatcagggactcccaagggggcagtgtgatgtggggaaaagagctctggaccgggagttaggaccgctagatcaagaaccctgggcaagtgccttgccctttctgagcctccgtttccgcagctgttgatgagaggcttgtctagatgagctctgggatgtctttcggttagattctacaacaacttttcattaattgaacaggtatttgccctgtgatggtcctgaatgaatcaaagctgtctccctgctggagataggtcatgggctgttggaagtaaaggtttagaactcaggagagaaaagactgtagacccatgtgttagggcatattagtaatcatatattgagaacatccttccgtgtcaatatacataaatggattggcctgattctttttaatcattgaaggtttctgaactgagcatgaggatgagccaactgatgttggggaatgtccctcttgaagtagaggacagagggcttgaggatgaattgggggtgggggtggtgaggaataagtgagaagactgggggcagaaaagccagttggggaaggttgtagtagactggatagagatgatgaagcgtaactgaggccatgattactgcatggagaaaatgggaagatggacctgaagagagaaaataattgaacctgggtaattgagctttaaggtgcaggatgccttcttaaagagaggaagaagtcaggcatgagttacgggtaataggtttttgacttgcataattgattgtggaggtggctcctgactaagggaatgaatgagagagagtcctggaggagggagagcataattttgttgatatcctccgggaggattcatctagatgtctgcagctcagcaatgaggggatcgacattgaaatgaatggaagatgatgtcatgagagagaacgagacgtgtagaacaattagagaaacattagaagagagtaaaggatggaattaaggagatatacaagtagtcaaggtgttggactaggagaatgtaaaagagcattctgagaagttgaaggcagttgctttactgcctgagccttagtttcctcatttctaaaatgaggattagaatcgtgcctactcgttgtgtttagggttacatgagagaatgtgtggaaggcacttaccttgcatatcagaagtagaactcatgcaataattcatcattcattccgtaagtaagagtcaagcaccagcatatgccaggcagctgggccagccctttggagtacacagaggagcaaaagggaagtctgagtgcctgaccttgtgggagaggaattgtgaaagaaagaagactcaatatcataaaaatgtgatttctatctacattcaggtaccagatattactatatatatttaatgcagtcctgataaatacaagataaattgggggacaagttaaatgactattaagtttataagaaaacatagatcagcaaaaacagccagaaaaaaaaaatctaaagtcaaaaaagatttgagctatgagaaggaaaccatcctacaacatgatactagtatatgagtagacagatcagctggagagattaaaagattcagaaacaggccaggtgcggtggctcacgcctgtaatcccagcactttgggaggccgagacgggcggatcacgaggccaggagatcgagaccatcctggctgacacggtgaaaccccgtctctactgaacaaaatacaaaaaattagccgggtgtggtagcaggcgcctgagtcccagctactcaggaggctgaggcaggagaatggcgtgaacccaggaggcggagcttgcagtgagtccagattgcaccactgcactccagcctgggcgacagagtgagactccgtctcaaaaaaaaaaaaaaaaaaaaaaagattcagaaacagaccccaatacacagttttgtatgtaacaatgatagctttttacatcaatgaggaaatgatggattactccacaaatgatttgagataggtagaaaaaattaaggtggctcgctaattcataccttattacagataaattctagatcaaagatttaaatgtgaaaagggaagccataaaagtactagagaggccaggcgtggtggctcacacctgtaatcccagcagtttgggaggctcaggcaggagtatcacttgagcccaggagttcaaaaccagcctgggcaacatagtgagaccccatctcttaaaaaaaaaagaattagctgggcacattagcatgcacctgtagtcccagcttctcaggaagctaagctaggaggatctcttgagcccaggagttcaaggttgctgtgagctaggctggcaccgctacactccagcctgggtgactccagaccctgtctcaaaaaacaaagtaccagaaataaacaaagggatttctttactaatcttagagtggggaagacatttctaattatgttacaaagcccagaaaccataaaataaaataaagatcaattttactaatgaatataaaaatatgtatgtggggagaagtgccgaaaaataaagtcaaagtacaaatgacaagtaaaaaatactagtaactcctaattagacaaaagactaattgccttaatatattaagaactcctacaaatcaataagaaaaagacctaaaatccattagaagtgggcaaaagaatttgaagaaacagtaaacagaaaaggagatgcaagtgggaagatgctcaggttcactcctaggagcagtaggaactaaaacaatcaggcactggttttaaaaccaccttttagattaggaacaaaacagcattaagaagactgtggtgaaggaaagtgctcatctgatatacctactggggattgctatggtttgaatgtgttccctccaaaataccaatgtgataatattaagaggtagggcctttaagaggtgattaggtcatgagggctccttccttgtgaatgggattaggcaccttttataaaagggcttgaggccaggcatggtggctcacgcttgtaatctcagcactttgggaggctgaggtggctggatcacccgaggtcaggagttcaagaccagcctggccaacatggtgaaacctcatctctcccaaaaatataaaaattagctgggcgtggtggtgcacacctgtaagcccagctacttgggaggctgaggcaggaaaatcacttgaatctgggaggaggaggttgcagtgagccgagaccatgccactgcattccagcatgggcgacagaacaagactccatcaaataaataaataaatgggcttgagggagtgagtttgcccctttttgcctttctgccatttgctctgtgagaacacagtgttcaaggtgccctcttggaagcagagagcaggcctcaccacaggctggcgccttgatcttggacttcccagcctccagaactgtgtgaaataaatttctgttctttagaaattactgagactcagatattttgttgtagcagcacaaaacggactgagagacaggaactaacttctgtggggagaagttggcaatacctgttataataaaaaagtcacagatcctttgaggtggcaattccacttttatagaaacaatcctcaggtccatcaacagggaagtaattaaatcaatctacaacagtgagacaacagagtatcatgcagacaataaaaggaacaatttagttattactttgggtttgttttcagtgtgttgatgtaatcagtgctgcagtggcttcagagtgatctacagttgtttccaaggtgtgtgtgtgtgtgtgtttgtgtgtgtatatgtgtgtgtgtgtgtatatatatatatatatatttttttttttttttttttgaaatagagtctcactgtcacccaggctggagtgcagtggcgcaatcccggctcactgcagcctctgcctctcgggttcgagcaattctcctgcctcagcctcctgagtagctgggactacaggcgtgcaccaccacacccagctaatttttgtatttttagtagagatggggtttcaccatgttggccaggctagtcttgaactcctgacctcaggtgatccacccgcctcagcctcccaaagccaagacacatttttaaatgaaaaaaaggcaagatggaaaataaatttttttttttttttttgagacggagtctcactctgtcacccaggctggagtgcagtggcacgatctcggctcactgcaagctccacctcctgggttcacgccattctcctgcctcagcctcccgagtagctgggactacaggcgcccactaccacgcccagctaattttttgcatttttagtagagacggggtttcgccatgttggccaggatggtctcgatctcttgacctcgtgatccacacccaccccccgccgcctcggcctcccaaagttctgggattacaggcatgagccaccatgcccggccaaaattttgttttaaataaaggaaaaaggaagggaaggagaaaaagggggaacatatatattgcataaattttgtctggaaggacaccaaaacgtgcttgccttggggagggtgtctggatcggatgggaagggagactaagctcttatctctgtccttttggaccttttgagttttagaccacatgcacacataatctaaaattaagtaattttaagatgaagtgaatgtgttcactataaaaaggaaatataacagattttaaaattacttataaaaatattaatgtatgtaattatatcactggtattctttttcatttaactatatgtgaacattttgccatttctttaaaaaatattcacaaacatcattttaatgcctgaatggtatttcatttagatacaaattagttaagtatgtatatattaataattctccattgtccgtttaggacatgtgacacatccatttaggaactcattttggtgtctttagtttcctgctattataaataatactgtgggccaggcgcagtggcttaggcctgtaatcccaacactttggaagtccgaggcaggaggatcacttgagcccaggagtttgagaccacgagtttgagaccaccttggttaacataatgagattcccatccctgaaaaaaaatgagccagacatggaatagtcccagctactcaggaggctgaggcaacaggattgcttgagcccaggaagttgaggctacagtgagccatgattgtaccactgcactccagcctgtgtgacacagcgagaccctgtctcaaaaaaaaaaaaaaaaatactatgaggaacatctttgtacattttatcttcatgtagatcttggattattttcttagaatagattattataaactgatttagtagctaaaagatatggaaaaagttgaggtttctggatacacactgtcaagtcactgcccaaggaggtcttggaagtttacagtctcattaacagggtttgagaatgaccattttctgacaggatttccaactctgaggattctttatttccccatttgctgttgactctaaagatgagagggtgagtgacgaatataaatatgggagaaaaataaaacgatgtgtttctgctttcgattggagagctccccagagccgtctttggaattgctgttccctgaggggatatggtagccagagcatgttggcccagctgatgttttctaggattggtctttgagtgtggcatttgctgtctctgtgtcccgagggccagtggcctgcactgggcagcctgtaacatcagatggcattgtgagatcaaagccccaggagacattccagcatgaagctggcctttcagatagagcctgtaattccatcccatggtgtcaggtcctaggacaagaacacctgcacagcactccacggtgcacggaggcccttctcaacagccccaagaaggaactgcggctcctccccacagaggacaggcgggcagcaggggagaagagggatagacacaaactccctctccttcagaggcccgagagtgaaatccagcgagtgtgcatggagcgcctgctctttaccaggtgctggatgagaatcagggaatgcagcggccagaacctgttggctcagctgccaggattaggtttcagctggacatgggaaaaatccagaccaaattcctgttcccgtggagctgacagtctaactgaggaagagccgaggactcggaggctccgggagccagtgtggcctgctcggggtttgtcattttccagagcagcgggtttcaggtggggctgaggcccttctgagccgtggctgtaaaccggcctcactcacctcagagggcagctgtggccactgagtgcgtgatgtgtatgaaaacacaggcacctgggccatggtacctttccttatcgtaggaattgtcagcatcatttttatcctctgttattactgttattatcataagccattttcctgtcctgaagcattgagcggtttccccagaggcagagcgcaggagtgaacctccgtgacctgtagaaggagccacctctggaacttccgggaattcttttagccaaggaggagccagagcgtgactagggcagcgcgcaaggctgctaggaagataggcagggtgcgccatctgctgtagccggggggaattgccgtggacagtgtcctggccctcctctattttacacaggggaaatgaaggccccaagaaaggcagggtcttgcccagggttaggtggcagagcttgggtttaaggtcacgtgtctcattctttgctctttctaccataggacacctccctgtctcacctgtctgatctttgagggcccctaattcattctttaggtgtttcttctgagctaggtgttgtggggggatgtgggccttgccctccatactgatcctcttctctgtctctctctttctctctctctctctctctctcttctctctctctctctcacacacacacacacacacacacacacacctgcagcacttactggctcaaccccaccctgggtgccttctgggcacttctgccaatgtcagctaccttctaaaagcattgcacaataatttgggtttataaaacttcaaccattgaaaaaatatagacttagaaaacgaaagttccccttaatcacaaagaaccacagttgacagggttgatagatgttttttcagatttttttttcatatgtctgctatctttccccacaggaactgggttttattttaggtgttgttttgcaacctctgtttttcagttgccagtttatctcagacattgtcctatgtcagtacaggcccatctggcacatttctttattattttttttttactgacatgtcattgtatatatttgtggggtgcaacttgatgttttgatacatatatgttgtataataatcagatcagggcagttagcatatccatcatctcatgcatttatttctttgtgatgagaatattcaaaagcttctgtagttattttgtaatatagaatgccttttttttttttttttttgagacggagtctcgctctgtcttgcccagggtggagtgcagtggcgtgatctcagctcacggcagtctccgcctcatgggttcaagagattctcctgtctcagcctccagagtaactgagactacaggcgtgtgctaccacacccgactaattttgtatttttagtagaggcgacgtttcacgatgttggccagcccagtctcgaacttctgacctcaggtgaactacccgcctcggcctcccaaagtgctgggattataggcatgagccaccgcacccggcctagaatgccttattgttaaccatcaccatactgtacaatagaacaggaacttactgctcctatctaattgtaactatgtacccgttgaccagctttccatcctttcctctcctctcccctccccagtctctggtaaccactgttgtattctctccttctatatcaacttttttttttttttttgacagagttttgctctgtcacctaggctagagtgcagtgtcatgatcttggctcactgcaagctccgcctcctgggttcacgccattctcctgcctcagcctcctgagtagctgggactacaggcgcctgccaccacgcctggctaatttttgtttgtttttttagtagagagggggtttcaccatgttggccaggatggtctcgatctcctgacctagtgatccacccgcctcggcctcccaaagtactgggattacaggtgtgagccactgtgcctagccgataacaaatttttttttttttaagattccatgtatgcgtaaaatcatgcagtatttgtgtttctgtgtctggcttatttcacttaacattatgtcctccaggtttatccgttttgtcccaaataacaagatttcattcttttttatggctgaatagtattcctttgtgtatatatacattttctgtatccattcaatcatgttggacatttgggttgattccatatcttggctattataaatagtgctgcagtaaacataggaggtcagatgtcttcttgacataccaatgtcagttctttggatatatacctagtagtgggattgttgggtcatatggtactgtttttaattttctcaggaaccctccatactgttttccatagtggctgtatggcacatttcttttttatgactacttcataattcacgcgatgcctaacctcctggtggacatttgggtggtttcctataggctgctattactgaccaggtgcagtaaacatcctcacactagagaaaacattgggcatttgcctgagtgggtctagaactaggatttgctgggtgggcccatgggcccaccccactggactatgaactcctaaagtcaggccagtgcttagaccacccctcccacttactaattcaggtctgcgaggtagccagagtccatgcaatgactgctatctaattgccttcagaaaaccataggtgctcaatgagagatactagtatccccttcgcaaattaaccttttgttaatatagtagcagtacttcttgttgccaagagtacataaatggacaatcttgtgtgctactggtgggaatataaataaaaacagcactgactttataagtctttctgccaattttttgtcatcatgaataccactgtgctatttgggaaggcaactgggaaatgtgtcaaaaatctaaaaattatttcacccttccctttagcccagcagttctacttctagggatatactctcaggaaacaattagggatgggcacagagactttcataaagtcccagtgctgtgtgtggcggtagaaaacagggaagtacctctgtgttcatttctggaggcctcatcctagagtaaatcatggcccatccaagcatgctggcacaaaattcatgtggagggagacttagtgacatgttctaaagcgtcccaaagagtaggctacaaaacacaacataaggtatggtcccaaatcatttctaaatgtatgtggctcttctttatatatgtggcactcttctctcctttctctagactgtgttaccaagcaccagggctgttaactgctgtctctgtagtaagaactactaatttattttttctttttttcgagatggagtctcgctttgtcgcccaggctggagtgcagtggcacaatctcggctcactgcaagttctgcctcccgggttcatgccattctcctgcctcagcctcctgagtagctggaactacaggcgcccgccaccacgcccggctaatttttttgtatttttagtagagatgggatttcactgtgttagccaggatggtcttgatctagaactactaatttcatatctttcctccccactccacctctcttctgagctccagcctcctagttccatgtacctagcctacctctccccttggagggctcacaggcatctcaaagttaccgaataggccaaacaggactttatgccctcaaatattcctcctttgttcttccatatgtcagcaaaccacacttctgtccacctacttattcacaccagaaacctaaattacctgtcaatccaacactacttcttgttggttcgatttccaagttatatctagaatccttcccactgcccccctcctccacccaccatcttggcacctgaacttcacaggagcctcctaacttgccccttcccagcactgctgtgcccggccgccacagtcacctttgaaaatgcacggctgctacttcatggccttgcctaaagcccctcaggaaccaagttccagatgtggtctggctcctgcctacctcagcagtgtccttggtgtcattgtccctcttctgccatgctcccgcctgctggctctttctgtccttccaagccctcatgcctccctccctcagagccttcacacatgctgttcccctctctgtagtgctcttcccctcactcttcatctgcatgacgcctcgtcctccttggttctcagctaaaatgtcactttgtgacccccagccttgatcaggtcccagtgatcactccagcaccctgcattctcccttgaagccttgagcaccaaggccatgacttaggtacgaggtgactttatgccacctgtagtagatggtaagctctgtgaggccagggaccatggccagtttgttcatggtggtatctgtgccagtgcctggcgcatggtattaataaatgtgtgtacatgtttgtcaataattttatttaaagaaaagtctgagcccatgttctttaaaatgttgatggtggttgtctgggtgtggaattatgagtgacttgttttgttctttgtacttttctgtgctttttgctttgttttcaataagaggcaataactgtcattttgacagaagccactgtgctggggaactggagctgtcctctctgcagaatgcatctggacttacctctgcccccttgccttctgtccccacaggcctgaggagcgatgcgacaggcatgatggaggtcgagtcctcctactcggacttcatctcctgtgaccggacaggccgtcggaatgcggtccctgacatccagggagactcagaggctgtgagcgtgaggaagctggctggagacatgggcgagctggcactcgagggggcaggttagagccagcaggtccttggcactactgcatgccagaggccctctgccgggccccgggctagcctccaagtcctagactgcccatactttcttagagaagaaaccacatttaagtcaggcctgccccatggtcagtggcagagtccagcaatctctaggttggaagatgtttgagtctcaggccccaaggactcctctggacaggcatccgggactcttcctgtccccctgccccctagcccaggtccctccacttctcgctatccccacagctatacctggctctggccactcacagctctcacctggctgactttagcggccggcttccctgggctccctacacccatctccgcccttcctgttcagctctatgcagcagccagcagaccccatttaaaccattctgtccatcatgcttctgccaaaaaaaaaaaatcccccagtggcttcactgagtgaagctaagcttgtcacattgccctggggcagtcctgctgtaggccgggccctgcccaagtctcacccggtgccactcctctccctgacaccctccagctacatctacctttggtctgtttctcagtcaagcctctccaaggggccttctctgagtgctagatcagccttccccaatcacatgaccctcatcactctctgacaaggtctcaggggtctaaatgtgagcgccgggagggcagaggccttgcattctgtttggcacacagcaggtgcttggtaaccacagaccgaatgacaaaaggaaacagcatccacccacccaagtcctggctggaacacccccaccccctccattcccccagagaaccccttggctcaagtccacagtcagcctgggaatttccttgggaagcttccctgacccctgcacggctgaggcctttccctcctgctctcacagcgccacagaggccgtgtgtgcttctcacagcacagccatcaggctgcaactgtctccccgtgggctgtccggagggccacagccctgcccctccctgggtagccctagtcttcttgcccctcactggccagaagtgaatcaaaagtacagaacagagaagactttgccggggcttggacccagccctctcatgttacagatggacaaactgaggcccagagaagttggaggacttgctctgggccacccagggagttaacatagaatctggccggcttgagagagagcccccagcaccctgtcgacggaaccccaccccaaaagccttccctgtcccataatctattcattctcctctgtcacgtggcccaggcagaacctccacaggctcaccctgctcgcctctccagcatcaactctcatcctctcgccagccatagtcaagtactttgatcgctcagaagcccctgtgggccttcacacgctgcacctctgtttgcttctcccctccctccccttgcctggctgggttctcttcattcttagagacccaggcatctgctcagctgagaagccttccctgaccgcagtacccctcccagaccggggaggcacctcttctccctgctgcctccatgagcccactgagcataatggccctgctctagactgagcttctccagcacaggctctgtgtcttgtgccctcggtgcctggtggtgtttggcacatgatggaggtaccgagtcaatggctgttcattgaccgactgaatgaccagcatgtccagctgccacactgggcacgctgccctgggctctctctcaaggcttctgtgtcctcaccctcagctctggtgagctctgttctgtctctctctccctcagcagttgtagctgctggcccatgtgcccaggctctcctaacacctgttttccctgactcagattccctaaagtatgggtcctctggctacatgacattcacctgccagggtgactgacatttaaaaagggggcctgaggaaagaacagtgctcactgaaggaaaggaaacactcacggtggcgtccaggcaagagtgactggccaaggagccttccaggaagcccgcagggagcagttccgtttcacaggcggggctgcgggccacgcccactccagcgactccccaaggcagggggagtacagagttccaggcgccaccccgctgggaataaaagcaggctttccaggcagcgggctcggaatagggtcccgagctaccacccacttcctagcttgccgcaggggcacagtgaggcagtgctgatgtcaggcctctataaaccttcaggaatgctgcttattggaggaggttaaatttggtagaaggggtactagccttggtggcaggcagggctctccacccttgatccaggcaaatcagctcacctcgctgggcctcggttttctcatgcatatcatgaccctagttacacctccatgttactgtgtgcattgcacgagaaagtgcccatccatctgcagaccctggagcttgctatagggtggtgattctcctggttctgtgaagggcttagcctgaaggataaaaaggtgtggtctggttgggctggatttgaactcaggccctcagtgagcttgtagggcacctagtaacattgcacagtgtcactggggtttaagaatgtaccacctattgagctctgcccacatgccaggccccacgtggtgcaccttatgaaaagacacctgtttatcatgcagcctgaggaggaaagcatggagactggggcctgggtgtgagtttggcactcccctcaacctgcactgctggtccagtgggtggcaggagctgcctgtcccaccttgcacaggggggctcaagggaagctgaaagtgaggagacttggcttgtatcctgactcccctcagtgaggtgctccatctctgtgagcctgctgctgcccctcaccccaccaagatgtctgacaggatggatttgagaaggaggtacaacacacaccccatgatgcacggttggcccccacagactctgatgcaggccacaccctggcgctccctgagctggcctggttcagtgctctttactctcttagaagaacattggccgggcacggtggctcacacctataatcccagcactttgggaggctgaggcaggcagatcacctgaggtcaggagtttgagaccagtctggccaacatggtgaaaccccgtctctactaaaaatacaaaaattaaaaaaaaaacaaacaaacagaacagctgccatttgctgagcacctgtgacacactggggacttaacatctggcctctccctctggggaacctgcacaaacaaagcaaccttcaagagcccttcacttgatgctttaagcacccatccataatggcccttaattgactcttaattatactaacaaacactatgtgtatttccatgtaaaaagatgttacagaccaggctaaagtccataggccaccaccacctcagtccagctccagctcgtcttgctccccagggcatatccactgctatcagtttggctgggccctttcacacctccttctgtgcattactttgtgtatatgtgcccaagaaaaacctctttctctcctctccagaaggacaggtggagggaagcgccccagacaaggaagctggcaaccagccccagagcagcgatgggaccacctcgtcttgaatctgaccttgtccaagaaggctggacgagagaccttctgtcccctcccagagggggaaccctggcactggcccagcagcctcttctctgagctccatgtcccagataaaccaggccagactgagaaggctccccagaggcctctgtggcctccactccgggaaagccctctgcccacacccacaggcttcacattcccaccaccttcgcaccgtgcccaggtacactttcaagacactgtaaccacaagatgttatttattgagctggcgccgggacttgggcggggcctgccctacagtgagcagcccacacaggaacgctcctctcgcgagcggcccgggcagggaccctgtcccaacaccaacacctcctctccagcccaatcttctgggtccagacctgcttgtcccttttttagaaaacacttttaaactttttaaaaattttaaaccttttttcagcagatatggagagagctgacaatcaattcacattttttaagccattttagctaaactgtcattgtgcatctctgaggttccctcatggagctccacagatccatttttagggaagggattttggctcaaaacgatctgaccacctctgccctgtccaccaggataagtgacacctaggacccaggaaataaatgccgatgatttgtgtgactggtttaagattatttctccttaaccttgcaaaaacaggggttgggccttattttccccaagtccacaattagccggacttgccccaggcttctagaacatacgattctgagaagatgctggcgttctgcagaggccagcaccctccaaggccagtgtctgatgagccctcttccatctcatctgctctcaccccaactgccagcttcaggaacccaaaaggaagctttactccttaaaacctagagttaggaggggctgagagttcagggaatgtttgagcaacaaccagagaagccttatttcttctggaaggaggacagcctctggacccctcttggcccacagcattgggatctctggcctggcattcacagccacccttaggctcaggccctgctgctgagcaggctgacccagctccctccatgctcatcctgcccacatcggcccgcccaagaccaccaaattacatgccacctgctgcatgccaccagccatgggcttctttattgagcaccagattttcagtacaagttgccacagaaggagggtttcagattcaaccatgcccatgtgcaagggcgctggtccctggccagggcacataatcagagaagtgacgcggccatgccgaggtatacgtgtgtgcagaaatggacacatagggttcaggagcatcagtaactgactattgagatcatggtcttcttggaaggaataaatgtaaaaatgttgctcagccccacagagttggggtgactccacagggtgaaggcttggaggagtggcgtcttcagaggttctgccctgctcgttggttcagagaagcaaaaagatcaggcaacttgtagtacccaggatgttgtaaaaatcatagaacaccagaaccagaaaggaactccttcctatgatggcaagaagatgccttgccaagaccacataggaagaaaggagcagaacaggcctgggcccctctccctgcccttggctttgggcagccatggaggtgtccccaactgcccagacctttgggactgggcttcagaaagtctccccttagaacagcctctcaagaacttttatagaaaacaaaccgatctaatgagacgctgctcccagccagggcccagaaaccagggagtcatcacacattcatggcgctgcccaagaatggaagggcatcttgctagaagtcccacagaaagccacactggggccaggacagggcaactgcccagaagcccagacaggaacctacctgcagaggctgaaggtggcatcccataggctttatagagcaggtcgagaagctccctcttttcatcttctgggaggaaactagatttggccgcattgatgttctggaaaggccagaatggcagacaacatggaaccagagaacaaagaaggcagctcttagcaatgtagtgatagtccatcctcttcactcaacatgggcagatacgcttagagggggaaggatttgtccactgtcacacggcagcaagtgccagagtagagaccatgaggtcgtgttcttaatttgtcattacatgaaaaagggctgtgagaaggaagttggagaaacctttgagagacagggtggcatgtagggggccagagacacctcgcagacacgtgcaggaatggacttattcagcctgggatttaagaacaacctgaagagagtgtgcaagacttcatagctgctgcacacacctttctggggagagggttgacagctttcactggattctttaaaggcactcaacccaagcaaaggatcaaaaacctggtcctaggtcaggacgtcaacacaaagatgtcttctctgtggaaagtgtctaggttgggcttgtcttggactgttgaggcagactcactccctctctccaaagattccaggccccggactggacctgtagataccatactcccaaacccgagtcaaggccagtatggctcacacccactcaccagccttttaaactcctcttcagtaaagcccatgtcccgtttggtcatctggtaatcagtgtccagggtggacttgaagatgagcgggtcatctgtgttgagcgagtagttagcctggtcatttttgagcctgcagaagagggaggaggagagaatcagcctccttttactcttacataaatagtcagaacacattgacgttcacccgcctttgatcctcacagcagcctcaaacagatctgaaagatctgatccttgtgcagagggggaaataaattcagaacttaggtgacttgttcaagtctatgtaaccagaaagtccagaatccagcccatcctgaagaccagagctgggcaaaggcagcagaggggccagacatgggaaccaggcagaatggcagccggtgggggcgtgggggtgggagccaagaaagcaacatccccctccggctgccaccctctccagccttcccctctgcaccctaccctgcttgttcctcagtcccactgggagctggctactccaacataccatggaagctgttcttggcacgatccctgaccaccatcttgttgtatctaatggatctttcctagctctgaccataatcgacttgcatagcagaatttcacactgttgactgtttcttgaaaccttttccctggatttctgtgacaccacacttttgactttcctcctacttgtctcttttgctggtcccttaaataccattgtccttctgggttctatcctaggcccttcttgctccaccacctcctggggccactgcttctccttcagccaccatatctgtgcagatgactcctggatctttttccagcccatggtatacccacatgcctccaagaacctccacaggtgccacgtgtccctaaggcaagccccaagacccccttgtcatcagaacatcagagccgaagcccctccccttctcatatgcctggcagatggataagtgctggcctgaccatggtcaccctgagttcttgctgtccttgtcttggggaaggcggctttttcctaaggcctgatactgctcctgtggcttggcgacaggacggaaggagggccttgaccctggttagactccaggatgggagccaggcagggtggaacagaccctccggtggaaagcttcaagatggcgctcaggggaatgcccaggggtcccaagggccaggtgtcaggaagagagaacatgctggccagagggactcctgcttcctatgcgatgcccagggggcagagttgggagaattggaagtgtggaagcttccctcagagtaatggagcgttctgctccagctgatgagctgtagggccccagctctgctggttagcagctgggtaatcccagtcaagccacagcacatctgggcctcggattcctcatttgtaagatgaggacggcaatgcctgcttcccagggtgtcgaagagatttcatatctaaaagacgcggcatgggctgatgcccaatccctaaagtttcttccctctttggccttcctggaacaaaattgaacaggcccaggggaacagagctcaccgaatgactgcatgctccgtgtccggcttccaggcaccagtgaggtagctggaccaggggcagatctggaagagcaggtgtgtggctggcagggatggccccaggccatgctgattcctccccccatgtctgggcctggggccacccctcgagttcctgggacccgccctgctttctgcctctctatacaggaagttgggacagccggggatggttcctccccactccctggcccgcttacctcgaagtgcatgttttcctgccgcagcctgttataaagggcctggtcttccagggtgtggtagccgtgtcccagccgctctgtcttgagtatgtccacagcctgtagagaagcagaatagagccaagtatgggaggaggcagtgaggagggaccccatggccagcccaggccctcacctcttttactacttcggccgagcccacctccccggcgtggacagtacggtgaatgccgctcttcacagcctcctggaagggggagagccaggtcatgggtgccctagcgggagggccccggcaggccctgccttgaccatgctgtggagattgaaccatcctagtcatgctgcctgcttcaacagcatggggaaacctggtcttttaccctccaagtccttatctaagtggtagctgtcactcattagccagttaccatgtgtcaggtagtatatgaagtgacttgtatacattatctaatattcacaactattatcccacccattttatgatgaaggactgaagctcaggagattcaagtaatgtgaccaaggtcagacaggaagtgtggaaccaagctctgagcccgggcagtgggactccagagccctgacttctccaccatgctgcaccctccacaggaggcccattcatcatcacgctggaagcgacttttgagatgtcggctccaactcagtcatcccaatagaagaaacagaggcccagagaagacacagtgttgcccaggttcacacagcaaatcacagccagaagcaggctcagcacaggactcccaacaccaagtggaggcttttctttctctctcccttccttccttctttccttccttcctccctccctcccttcctctttttccttccttcctctctttctttctctttcttttctctttcttctttcttccttttttttttttttgagacagggtctccctctgtcacccaggctggagtgcagtcgcattatcacagctcactgcagctttgacttcctggactcaagcaattctcccacctcagcctcccaagtagctgggactacaggcatgcaccaccatgcctgactacttttttttgtatttgcagagatggatctcactatgttgccctggctggtctcaaactcctaggctcaagcaatcctcctgcctcgcctcccaaagtgctgggatcacaggcatgaaccaccacgcctggcccagggggattccagttccaagccttaagacccaacaaagacacacttcagaactcaggagacaccatggtccctggttcttgtgatttctcccaactatgggtgggagacaagctcacccagggccagcctctccattccttctcacaggacccacctggtaggcctggacatgtccaggcaagaggctgcttcctgggatggtctcatctccagccaggtcaatggctaccacggtctgctgctggtacttcttacacagctccaccaccttgggggaccagtctgtgggcgagatgcccacccaggctctgtcaccagcaccatggagagacctcccagcctacctgcctgctgtcccacccaaaccccccatgggaggccagcacaaaacagggctcagtgtcttcaaatcctaactgctatgtcctaaccacatggcctgcggaaaactgctctgcttatggcctcagtttccgcccttttcagaaagaaccctgccagctattgcacagggtcacggccaggctttgccgaggccatgtgtgtaaagcaccaaggacggggcctgagctcagtaaatgacacggacccttctctcacctggtgtttccaacaacactcatggtaggcttattcccatgcgcagatgaggaaacggaggaccgtttaacacgtcatctaaaatagaactcacactagtattgggaagtatctcgctaatgtattaggtactcttaaccaataaagttattctgaagtgtttaagaaagaatgaatgaacacaggctttggaactagatgtccccggatacaaatccagggtttgtgccttgcaagaggctgcacctcactccacctcagtttcctcatctgtcaaatgggactaagcaatggtagttctgctttgcaggctgctgcgaggattagaggaaatgcgtgcaggtagctctttggttcttactaatcctgagggtagaggaatgaagtaagtgtgatcatctccttgtgacagtgcacaactgaggtgtcttggtgcataaccagagcagcagtgtgacctgcccaatatcacacagtgaggctgtgcaccatgaggcacaaactctagagatctgatctgcgtcagtgacaagggagacccctcagaaatcttggaaatcagacctattcaggcccagacaggatggggcctggtccactgggtctcgagggaggactatgggctgatcagaatctagcctagatttttttttcaatagttacgttcctatttggtgttgagcttcctgcagggtggctataaaggcatggtgtccctggggagaacatctccagaagttctgagcctgcctaggaggtctccagttgtttcatgaagccccaagttcatgccagtgggctcaaggggacaccatggggctgtggggcacaggggagatcaggtacagccccactgctaggccaggaggtcagggccagggtgagacgggcggccctgggcagggcggtgatcctactcactgggctggtggcgcatgcagcacaggatggaccgggccttgaccccgaagtctcgctccccctcctgcaggccctggcccactagggccaccacctcgtctggggtgaggtcccctctgtgtgaggagaggagtagggatgggcctgaggcaaaaggaaggcctaaagggcagctctgggactgggacagaggaggaagaggaggctttggggaggaccctcctcccccactgacccactgcctcagaggaaagactggcagagatgcccccaggccctaacatgtccctctagctcttaaagcagctgggtgctcctagatcttagtgggaggtgtggggtgtcaacatggccctccccacccccagatggacagcattgctaagcttgggcctgccatgatgttcacattctatatgtatcagaatcatggctcagaaaatggggcagggtggttttgtgataccacttagagatccatgggggcccaggcagggggctagaaatgggccagactcacttcagttatgaagttagagcaggacctttagggcctttagagatctgatcagcatcagtgacaagggagacccctcagaaatcctgggtggctaagcaggttaacattcctggacagcaggcctgtggccagagcaagacacagccaaacacttgtgcccaaggtaagaacataacggcaaagggaggatgggaaccacgtctcttgtgacagagttaaacccatctttctgaggccatggaccagactgggggcaagaacaaggtcttgcttgggtcagggattcccagcagttcgcccttccagtctcagagctgagcctcccagccacaccctcagcatggccccttccaggcccatcactcactcagcctggttccaggggattggctccactttggagttggccagcaggtgcggactgtaccgcacctccacatacaccacgccctctttggccttcatctctacaaactcataggcgatccttttgatagcctcccggcagcccctgggaagggaagaaaggggttgggaacaaccttccccaagtcccttgggagctccaggagcaaatgacatccccaacccttggcagattaaacccacttcatcccccagacccaagctctgggcatccactggataagatcccagacactgggcaagtcctatcagctctactttggaactgcataccagttctcacccctccatcctggcctgaatcacgccatctctaactggcctccctgtctccatgcttgcccctgtcatcctgttctccacccagcagttggggcaatcttttaagaaggtaaatcaaagcatatcacttctcccctcgaagccccagtagcttcctgccacggagagtgacatcgcaactcccaggtcctgcccacaaggcctgcatcctccaggccttgccagcctccccagcaccttccttctccctcattccctgaggccaccggagaagacacaggcctgctcttccccgatactgtcctacactgcgtctctcccgctcccctggtttagagccagctgaagcttcacctcctcagagaggccttccctgaccaccttatcttttttttttttttttgagacagaatcttgctctgtcgcccaggctggagtgcagtggcgccatctcagctcactgcagcctctgcctcctgggttcaagtgattcgtctgcctcagcctcccaagtagctgggattacaggcgcatgccaccacgcccggctaattttttgtatttttagtagagacagcgtttcgctgtgttagccaggatggtctcgatctcctgacctcatgatccgcccacctcagcctcccaaagtgctggggatacaggcgtgagccactgtacctggcccagaccgccttatcttaaaacggcccctccaccattctcctgggctttctttttctcccaggtccttatcactactcaacattgtgtgtcatatggcttatcagccagtttgctgtattccctactagaatgcagtctccatgtggcaaggacccctctgtcttgggatggctgcgacctctcagctgaggaccatgcctaggacagagtagcccaatatttgttggtgatggagttaaggctggcagggaagagaaatgagagaaaaggacacagctggacaagtccagagggatgcctggatgtgggagacacgtgggatacagtcatggacttggatccttgtgcccacacttatctgctgtgtgacccctggttagtcaccctctgacacctaggtcaaggagttattgcggggacaaatgagtcaaacttcataaaccccacccgggtcagtgcttggagcagagcggacaaatgctcaaaacattttcgttgttattactgcatgtttgttccagaagcaaggcacaaattggcctgccagggccactgtgttgatcacgtaacggtggactgtgcttagctggaagttcccaccatgaagagtgaaaatgaagtggttactagaatgtgtgagggaaggcacacaagtgctgggagagcccagcgtgggaagaaagtgccctgcccaggggagatcaggccactctcaggagaaggggtcaccagaagttcttgcatcttcaggatgaggatggaggccaggcgcagtggctcacgcctgtaatcccagcattttgggaggccgaggcgggcagatcacctgaggtcaggaattcgagaccagcctggcaaacatagtaaaaccccatctctactaaaaatacaaaaccattagttgggtgtgatggtgggtgcctgtgatcccagctacttgggaggctaaagcaggagaatcccttaaactgggaggtggaggttgcagtgagctgagatcgcaccactgcacttcagcctgggcaacagagtgagactctgtctcaataaataaataaataaataaataaataaataaataaagcagtcatggaaatttctctctagtactcgcccataccccttctgggccttttcggtacctagtgctgttccctggcgactcaagacaagaaaaagaaaaagccttttggagaatcttccccacatctccccgcccccaccctatattcaggcctctcctcccctcacaacacgaagccctgaactaggagatagatggcccgggttcaagccctgcactgcctctgaccctgtgttcttagctcccatattctgccatttctctgtagaacttgaagcaatttcagtccatcacacccacatctcagaagggaaaactgaggcctaaaggcactggagagactcactaagtgtacacaatggtgagaaagacagctgtggtttcagagcaacttctctggcccccacaggctgagggacaggcctggtcctagtcatagggatcaatgctgccctaggacctgtgggttgggggcaactcacgcgatagcaggcatgtagtagtcaaacttggccaggaagtctggaagggtgagcggcttgtccatgccaatgacgttcagcagcccctctgctgtgttagctgggagggcgatccctctcctcctggaaacaaaacagtgagtggtggaccaacccggggcaggatccaggcaggcctgacaggccaggatggagcagactcaggagcgccagcctccttgcaggaccacagcaggagacatgggcgtctctcagtccagctgctcccactggacagatggggaaactgagaaccaggaccggaatttttccagcaccttctacccccaatgcacaagtcagcaaatctcaagggggataaacaggttgaagtgtgtgtgtgtgtgtgtgtgtatgtgtgcacacatgcacacaccccctccatatccttggttgactgatgcttggagacaaggaaagtgccaggtcaagttcatggcttcctcctcagccccaggagctggctcagccagctggtcctatgcccagtcaggggttatcaggggcagtaactgcagcatcacaattcccagggtaggggcaggcatcaggacttcaccctccatctggctggcacatcagaggcttgcccagcccagcgcactgggagagggccggtggaggctcaggggaggggcccagtgggccgccagccagctcagacctctctcccctccctgcccacagccgccacaccaagctggactacagcagcgctcagtaagagcgtgctggaaacagcccctctggcttggagcctccatttctccccaagcatctcggcctcccctcccagccacgggaagcagggtgcgagctcaggggggctccctctcttctgcacacgctcctgcctcctcatcccatcccggctctgctccagctcacaaggtcacctcgagcctcagtttccccccccttttttttttaagatacaacagccagagaacaccagacattaagaaatgcttctaggctgggcatggtggctcacgcctgtaatcccagcactttggcctcccaggccaaggtgcgaggatcatgaggtcaggagattgagactatcctggccaacatggtgaaaccccgtctctaccaaaaatacaaaaattagttgggtgtggtggtgtgtgcctgtaatcccagctactcaggaggctgaggcaggagaatcacttgaaccagggagtcagaggctgtggtgagccgagatcatgctactgcactccagcctggtgacagagcaagactctgtatcacaaaaaaaaaaagaaaaaaaaaagaaatgcttctaacatgagggacaaaacaacagaatagacaaaagcactccgaggaaacagcacagagaacagatgaaaacctaagaaccaaaacaaaaaagacatgaatatcctcaaagagatgagaagatccttgaaaggagggaacattcagaacccaagaacgagccctcggaaatttacaagagaatgcggcagcaactgtcacgatgtaagaaaagaactggaagctaaaagtgaagaaatcctccacaaagtagaacaaaaagacaagatgatgaaaaataggagtaaacagttaaggaaattagaagattaaatcaggaggtccaagcatccaattatccacaaagcagaagcagaaaaataggaggccgggtgcagtggctcatacctgtaatcacagtactttgggaagccaaggctggcggatc

SEQ ID NO: 62 - DNA, 2359 bp, Homo sapiens
  Genbank Accession No. AB018356
ctgagcgggggagcggcggcccccagctgaatgggcgcgagagcggcgctgggggcgggtgggggcgcggggtaccgggctggcggccggccggcgccccctcattagtatgcggacgaaggcggcgggctgcgcggagcggcgtcccctgcagccgcggaccgaggcagcggcggcacctgccggccgagcaatgccaagtgagtacacctatgtgaaactgagaagtgattgctcgaggccttccctgcaatggtacacccgagctcaaagcaagatgagaaggcccagcttgttattaaaagacatcctcaaatgtacattgcttgtgtttggagtgtggatcctttatatcctcaagttaaattatactactgaagaatgtgacatgaaaaaaatgcattatgtggaccctgaccgtgtaaagagagctcagaaatatgctcagcaagtcttgcagaaggaatgtcgtcccaagtttgccaagacatcaatggcgctgttatttgagcacaggtatagcgtggacttactcccttttgtgcagaaggcccccaaagacagtgaagctgagtccaagtacgatcctccttttgggttccggaagttctccagtaaagtccagaccctcttggaactcttgccagagcacgacctccctgaacacttgaaagccaagacctgtcggcgctgtgtggttattggaagcggaggaatactgcacggattagaactgggccacaccctgaaccagttcgatgttgtgataaggttaaacagtgcaccagttgagggatattcagaacatgttggaaataaaactactataaggatgacttatccagagggcgcaccactgtctgaccttgaatattattccaatgacttatttgttgctgttttatttaagagtgttgatttcaactggcttcaagcaatggtaaaaaaggaaaccctgccattctgggtacgactcttcttttggaagcaggtggcagaaaaaatcccactgcagccaaaacatttcaggattttgaatccagttatcatcaaagagactgcctttgacatccttcagtactcagagcctcagtcaaggttctggggccgagataagaacgtccccacaatcggtgtcattgccgttgtcttagccacacatctgtgcgatgaagtcagtttggcgggttttggatatgacctcaatcaacccagaacacctttgcactacttcgacagtcaatgcatggctgctatgaactttcagaccatgcataatgtgacaacggaaaccaagttcctcttaaagctggtcaaagagggagtggtgaaagatctcagtggaggcattgatcgtgaattttgaacacagaaaacctcagttgaaaatgcaactctaactctgagagctgtttttgacagccttcttgatgtatttctccatcctgcagatactttgaagtgcagctcatgtttttaacttttaatttaaaaacacaaaaaaaattttagctcttcccactttttttttcctatttatttgaggtcagtgtttgtttttgcacaccattttgtaaatgaaacttaagaattgaattggaaagacttctcaaagagaattgtatgtaacgatgttgtattgatttttaagaaagtaatttaatttgtaaaacttctgctcgtttacactgcacattgaatacaggtaactaattggaaggagaggggaggtcactcttttgatggtggccctgaacctcattctggttccctgctgcgctgcttggtgtgacccacggaggatccactcccaggatgacgtgctccgtagctctgctgctgatactgggtctgcgatgcagcggcgtgaggcctgggctggttggagaaggtcacaacccttctctgttggtctgccttctgctgaaagactcgagaaccaaccagggaagctgtcctggaggtccctggtcggagagggacatagaatctgtgacctctgacaactgtgaagccaccctgggctacagaaaccacagtcttcccagcaattattacaattcttgaattccttggggattttttactgccctttcaaagcacttaagtgttagatctaacgtgttccagtgtctgtctgaggtgacttaaaaaatcagaacaaaacttctattatccagagtcatgggagagtacaccctttccaggaataatgttttgggaaacactgaaatgaaatcttcccagtattataaattgtgtatttaaaaaaaagaaacttttctgaatgcctacctggcggtgtataccaggcagtgtgccagtttaaaaagatgaaaaagaataaaaacttttgagg

SEQ ID NO: 63 - DNA, 2288 bp, Homo sapiens
  Genbank Accession No. AF119415
ggcggccggccggcgccccctcattagtatgcggacgaaggcggcgggctgcgcggagcggcgtcccctgcagccgcggaccgaggcagcggcggcacctgccggccgagcaatgccaagtgagtacacctatgtgaaactgagaagtgattgctcgaggccttccctgcaatggtacacccgagctcaaagcaagatgagaaggcccagcttgttattaaaagacatcctcaaatgtacattgcttgtgtttggagtgtggatcctttatatcctcaagttaaattatactactgaagaatgtgacatgaaaaaaatgcattatgtggaccctgaccgtgtaaagagagctcagaaatatgctcagcaagtcttgcagaaggaatgtcgtcccaagtttgccaagacatcaatggcgctgttatttgagcacaggtatagcgtggacttactcccttttgtgcagaaggcccccaaagacagtgaagctgagtccaagtacgatcctccttttgggttccggaagttctccagtaaagtccagaccctcttggaactcttgccagagcacgacctccctgaacacttgaaagccaagacctgtcggcgctgtgtggttattggaagcggaggaatactgcacggattagaactgggccacaccctgaaccagttcgatgttgtgataaggttaaacagtgcaccagttgagggatattcagaacatgttggaaataaaactactataaggatgacttatccagagggcgcaccactgtctgaccttgaatattattccaatgacttatttgttgctgttttatttaagagtgttgatttcaactggcttcaagcaatggtaaaaaaggaaaccctgccattctgggtacgactcttcttttggaagcaggtggcagaaaaaatcccactgcagccaaaacatttcaggattttgaatccagttatcatcaaagagactgcctttgacatccttcagtactcagagcctcagtcaaggttctggggccgagataagaacgtccccacaatcggtgtcattgccgttgtcttagccacacatctgtgcgatgaagtcagtttggcgggttttggatatgacctcaatcaacccagaacacctttgcactacttcgacagtcaatgcatggctgctatgaactttcagaccatgcataatgtgacaacggaaaccaagttcctcttaaagctggtcaaagagggagtggtgaaagatctcagtggaggcattgatcgtgaattttgaacacagaaaacctcagttgaaaatgcaactctaactctgagagctgtttttgacagccttcttgatttatttctccatcctgcagatactttgaagtgcagctcatgtttttaacttttaatttaaaaacacaaaaaaaattttagctcttcccactttttttttcctatttatttgaggtcagtgtttgtttttgcacaccattttgtaaatgaaacttaagaattgaattggaaagacttctcaaagagaattgtatgtaacgatgttgtattgatttttaagaaagtaatttaatttgtaaaacttctgctcgtttacactgcacattgaatacaggtaactaattggaaggagaggggaggtcactcttttgatggtggccctgaacctcattctggttccctgctgcgctgcttggtgtgacccacggaggatccactcccaggatgacgtgctccgtagctctgctgctgatactgggtctgcgatgcagcggcgtaggctggctggttgagaaggtcacaacccttctctgttggtctgccttctgctgaaagactcgagaaccaaccagggaagctgtcctgaaggtccctggtcggagagggacatagaatctgtgacctctgacaactgtgaagccaccctgggctacagaaaccacagtcttcccagcaattattacaattcttgaattccttggggattttttactgccctttcaaagcacttaagtgttagatctaacgtgttccagtgtctgtctgaggtgacttaaaaaatcagaacaaaacttctattatccagagtcatgggagagtacaccctttccaggaataatgttttgggaaacactgaaatgaaatcttcccagtattataaattgtgtatttaaaaaaaagaaacttttctgaatgcctacctggcggtgtataccaggcagtgtcccagtttaaaaagatgaaaaagaataaaaacttttgaggaaaaaaaaaaaaaa

SEQ ID NO: 64 - DNA, 2415 bp, Homo sapiens
  Genbank Accession No. AF119418
gaagaatgtgacatgaaaaaaatgcattatgtggaccctgaccatgtaaagacctacaccgtgcctttaaaggaagcagggccctccctgctgaagcattcagtgagcccaggcaccagcatcttcaaaccgagtcttttctctccttagtgctgctccccgctttccaggccttcctgggatatcttagagctcctgaaggtgcggcactcgccttgaggcactttcttctgagctgtgagctatgggcaagcagtggagggggaagagagcagctgaagcagatgccggttcaacttacttaaagatgtgggacaagctctgaggaagcccccaagacaatgatgtctggttgtgcaccattgaagcaagaacagaaaccatcccagagtggaggacatggcccatgtggtcctcctgttctgagtggctatgagatggagttctgtgtgagctctctacagaaaaagccctgtctccaggcaatcagtggagatctgttaaacgagttgaaacaaaagaggacaaggaattgctgtggctttagacgttgccaggacatgtagaaactcactcaggatttactactgcatccactgtcacttaggcgcaggaggggtcacagtcagaagagagctcagaaatatgctcagcaagtcttgcagaaggaatgtcgtcccaagtttgccaagacatcaatggcgctgttatttgagcacaggtatagcgtggacttactcccttttgtgcagaaggcccccaaagacagtgaagctgagtccaagtacgatcctccttttgggttccggaagttctccagtaaagtccagaccctcttggaactcttgccagagcacgacctccctgaacacttgaaagccaagacctgtcggcgctgtgtggttattggaagcggaggaatactgcacggattagaactgggccacaccctgaaccagttcgatgttgtgataaggttaaacagtgcaccagttgagggatattcagaacatgttggaaataaaactactataaggatgacttatccagagggcgcaccactgtctgaccttgaatattattccaatgacttatttgttgctgttttatttaagagtgttgatttcaactggcttcaagcaatggtaaaaaaggaaaccctgaacgtccccacaatcggtgtcattgccgttgtcttagccacacatctgtgcgatgaagtcagtttggcgggttttggatatgacctcaatcaacccagaacacctttgcactacttcgacagtcaatgcatggctgctatgaactttcagaccatgcataatgtgacaacggaaaccaagttcctcttaaagctggtcaaagagggagtggtgaaagatctcagtggaggcattgatcgtgaattttgaacacagaaaacctcagttgaaaatgcaactctaactctgagagctgtttttgacagccttcttgatttatttctccatcctgcagatactttgaagtgcagctcatgtttttaacttttaatttaaaaacacaaaaaaaattttagctcttcccactttttttttcctatttatttgaggtcagtgtttgtttttgcacaccattttgtaaatgaaacttaagaattgaattggaaagacttctcaaagagaattgtatgtaacgatgttgtattgatttttaagaaagtaatttaatttgtaaaacttctgctcgtttacactgcacattgaatacaggtaactaattggaaggagaggggaggtcactcttttgatggtggccctgaacctcattctggttccctgctgcgctgcttggtgtgacccacggaggatccactcccaggatgacgtgctccgtagctctgctgctgatactgggtctgcgatgcagcggcgtaggctggctggttgagaaggtcacaacccttctctgttggtctgccttctgctgaaagactcgagaaccaaccagggaagctgtcctgaaggtccctggtcggagagggacatagaatctgtgacctctgacaactgtgaagccaccctgggctacagaaaccacagtcttcccagcaattattacaattcttgaattccttggggattttttactgccctttcaaagcacttaagtgttagatctaacgtgttccagtgtctgtctgaggtgacttaaaaaatcagaacaaaacttctattatccagagtcatgggagagtacaccctttccaggaataatgttttgggaaacactgaaatgaaatcttcccagtattataaattgtgtatttaaaaaaaagaaacttttctgaatgcctacctggcggtgtataccaggcagtgtcccagtttaaaaagatgaaaaagaataaaaacttttgaggaaaaaaaaaaaaaa

SEQ ID NO: 65 - DNA, 3494 bp, Homo sapiens
  Genbank Accession No. AF119417
gtggcacgatctcggctcactgcaagctctgcctcccgggttcacaccattctcctgcctcagcctcccgagtagctgggactacaggtgcccaccaccacgtgcccggctaatttttgtatttttagtagagacgagtttcaccgtattagccaggatggtcatgtttttgttcttgtttttgttttagagacagggtctccctctgtcacccaggctggagtgcagtggcacaatcacagctcactacagtgtcaaccttccaggttgaggatcactcgatactcatgcctcagcctcccatgtagctggggccacaggggcacaccaccactcctgacccattttttaaaaaattttttgtataggtggggtctcaccatgttgcccaggctagcctccaactcctgggctcaagcaaccctctcaccttggcctctcaaagtgctgagattataggtgtgacccgccatgcccgcctttcctctgagttttgttgcattcacgcagctcctggctgaggcaaaacattaaaatgcatatggaaatgcaggctgggaaaatgctttgaaaccaatgcaatttctgtgttaaggggacattccctgattctttcaggtaatttgcattctagactgtgacattctgtatctcaactgataaataagcctgtttgtcatcctgctagatgagaacctgatatatgaaaccttttttttaatcgtggttaaaaaaaacataaaatttaccatcataattatttttaaatgtaccatttggcagcattaagtatatttaaactcttgtgaaacaaatttctagaatgttttcatcttgcaaaaccgaaacgctgtacctattaaacaactccccttttctccctctcttcaaccctggtaaccatgtttttatgaatttgactactttagatacctcatataagtcaggtcatacagtatttgtctctttgtgactggcttcacttagcataatgtcctcaaagtttaactatgttgtagcatgtatcagaattttatgaaacatgaagtcttagacaccccgaagtacattttcaccccaaatgtatttgaacagtgttaggctgggggtgggaggcgggagtccttcttgctttgcctgtgcaatgaaatgaataccctgctgtgtttatctccttgtcatgtgattctcccaggttgtttcttcaagtttctgagccaaacttaactctaaaaagcaaatattctgtgttaaaagacagtaatcaacacgggagctacatcagacatcataggacaaattgtcatctagaagagtatatttttaatgcaggagagtttttaaaacccagattggtgtgatttcattccagagagctcagaaatatgctcagcaagtcttgcagaaggaatgtcgtcccaagtttgccaagacatcaatggcgctgttatttgagcacaggtatagcgtggacttactcccttttgtgcagaaggcccccaaagacagtgaagctgagtccaagtacgatcctccttttgggttccggaagttctccagtaaagtccggaccctcttggaactcttgccagagcacgacctccctgaacacttgaaagccaagacctgtcggcgctgtgtggttattggaagcggaggaatactgcacggattagaactgggccacaccctgaaccagttcgatgttgtgataagaactcagtgcactgctcttggtcagtgtggctccaggaacagtgagggacacaggaagctcttcacagtccctgcccacaagggacttaacgtttgagaagttgaaacaaaaacacaaaatggttggatgctccaaactgtcatactgaccctaagttggaggagcatgctgctggctacagttaaacagtgcaccagttgagggatattcagaacatgttggaaataaaactactataaggatgacttatccagagggcgcaccactgtctgaccttgaatattattccaatgacttatttgttgctgttttatttaagagtgttgatttcaactggcttcaagcaatggtaaaaaaggaaaccctgccattctgggtacgactcttcttttggaagcaggtggcagaaaaaatcccactgcagccaaaacatttcaggattttgaatccagttatcatcaaagagactgcctttgacatccttcagtactcagagcctcagtcaaggttctggggccgagataagaacgtccccacaatcggtgtcattgccgttgtcttagccacacatctgtgcgatgaagtcagtttggcgggttttggatatgacctcaatcaacccagaacacctttgcactacttcgacagtcaatgcatggctgctatgaactttcagaccatgcataatgtgacaacggaaaccaagttcctcttaaagctggtcaaagagggagtggtgaaagatctcagtggaggcattgatcgtgaattttgaacacagaaaacctcagttgaaaatgcaactctaactctgagagctgtttttgacagccttcttgatttatttctccatcctgcagatactttgaagtgcagctcatgtttttaacttttaatttaaaaacacaaaaaaaattttagctcttcccactttttttttcctatttatttgaggtcagtgtttgtttttgcacaccattttgtaaatgaaacttaagaattgaattggaaagacttctcaaagagaattgtatgtaacgatgttgtattgatttttaagaaagtaatttaatttgtaaaacttctgctcgtttacactgcacattgaatacaggtaactaattggaaggagaggggaggtcactcttttgatggtggccctgaacctcattctggttccctgctgcgctgcttggtgtgacccacggaggatccactcccaggatgacgtgctccgtagctctgctgctgatactgggtctgcgatgcagcggcgtaggctggctggttgagaaggtcacaacccttctctgttggtctgccttctgctgaaagactcgagaaccaaccagggaagctgtcctgaaggtccctggtcggagagggacatagaatctgtgacctctgacaactgtgaagccaccctgggctacagaaaccacagtcttcccagcaattattacaattcttgaattccttggggattttttactgccctttcaaagcacttaagtgttagatctaacgtgttccagtgtctgtctgaggtgacttaaaaaatcagaacaaaacttctattatccagagtcatgggagagtacaccctttccaggaataatgttttgggaaacactgaaatgaaatcttcccagtattataaattgtgtatttaaaaaaaagaaacttttctgaatgcctacctggcggtgtataccaggcagtgtcccagtttaaaaagatgaaaaagaataaaaacttttgaggaaaaaaaaaaaaa

SEQ ID NO: 66 - DNA, 1375 bp, Homo sapiens
  Genbank Accession No. AF161396
ttcggcacagaaaaatcccactgcagccaaaacatttcaggattttgaatccagttatcatcaaagagactgcctttgacatccttcagtactcagagcctcagtcaaggttctggggccgagataagaacgtccccacaatcggtgtcattgccgttgtcttagccacacatctgtgcgatgaagtcagtttggcgggttttggacatgacctcaatcaacccagaacacctttgcactacttcgacagtcaatgcatggctgctatgaactttcagaccatgcataatgtgacaacggaaaccaagttcctcttaaagctggtcaaagaggagtggtgaaagatctcagtggaggcattgatcgtgaattttgaacacagaaaacctcagttgaaaatgcaactctaactctgagagctgtttttgacagccttcttgatgtatttctccatcctgcagatactttgaagtgcagctcatgtttttaacttttaatttaaaaacacaaaaaaaattttagctcttcccactttttttttcctatttatttgaggtcagtgtttgtttttgcacaccattttgtaaatgaaacttaagaattgaattggaaagacttctcaaagagaattgtatgtaacgatgttgtattgatttttaagaaagtaatttaatttgtaaaacttctgctcgtttacactgcacattgaatacaggtaactaattggaaggagaggggaggtcactcttttgatggtggccctgaacctcattctggttccctgctgcgctgcttggtgtgacccacggaggatccactcccaggatgacgtgctccgtagctctgctgctgatactgggtctgcgatgcagcggcgtgaggcctgggctggttggagaaggtcacaacccttctctgttggtctgccttctgctgaaagactcgagaaccaaccagggaagctgtcctggaggtccctggtcggagagggacatagaatctgtgacctctgacaactgtgaagccaccctgggctacagaaaccacagtcttcccagcaattattacaattcttgaattccttggggattttttactgccctttcaaagcacttaagtgttagatctaacgtgttccagtgtctgtctgaggtgacttaaaaaatcagaacaaaacttctattatccagagtcatgggagagtacaccctttccaggaataatgttttgggaaacactgaaatgaaatcttcccagtattataaattgtgtatttaaaaaaaagaaacttttctgaatgcctacctggcggtgtataccaggcagtgtgccagtttaaaaagatgaaaaagaataaaaacttttgaggaaaaaa

SEQ ID NO: 67 - DNA, 6847 bp, Homo sapiens
  Genbank Accession No. AF200348
  unsure (1)..(6838): n = a or c or g or t
agccggccgtggtggctccgtgcgtccgagcgtccgtccgcgccgtcggccatggccaagcgctccaggggccccgggcgccgctgcctgttggcgctcgtgctgttctgcgcctgggggacgctggccgtggtggcccagaagccgggcgcagggtgtccgagccgctgcctgtgcttccgcaccaccgtgcgctgcatgcatctgctgctggaggccgtgcccgccgtggcgccgcagacctccatcctagatcttcgctttaacagaatcagagagatccaacctggggcattcaggcggctgaggaacttgaacacattgcttctcaataataatcagatcaagaggatacctagtggagcatttgaagacttggaaaatttaaaatatctctatctgtacaagaatgagatccagtcaattgacaggcaagcatttaagggacttgcctctctagagcaactatacctgcactttaatcagatagaaactttggacccagattcgttccagcatctcccgaagctcgagaggctatttttgcataacaaccggattacacatttagttccagggacatttaatcacttggaatctatgaagagattgcgactggactcaaacacacttcactgcgactgtgaaatcctgtggttggcggatttgctgaaaacctacgcggagtcggggaacgcgcaggcagcggccatctgtgaatatcccagacgcatccagggacgctcagtggcaaccatcaccccggaagagctgaactgtgaaaggccccggatcacctccgagccccaggacgcagatgtgacctcggggaacaccgtgtacttcacctgcagagccgaaggcaaccccaagcctgagatcatctggctgcgaaacaataatgagctgagcatgaagacagattcccgcctaaacttgctggacgatgggaccctgatgatccagaacacacaggagacagaccagggtatctaccagtgcatggcaaagaacgtggccggagaggtgaagacgcaagaggtgaccctcaggtacttcgggtctccagctcgacccacttttgtaatccagccacagaatacagaggtgctggttggggagagcgtcacgctggagtgcagcgccacaggccaccccccgccgcggatctcctggacgagaggtgaccgcacacccttgccagttgacccgcgggtgaacatcacgccttctggcgggctttacatacagaacgtcgtacagggggacagcggagagtatgcgtgctctgcgaccaacaacattgacagcgtccatgccaccgctttcatcatcgtccaggctcttcctcagttcactgtgacgcctcaggacagagtcgttattgagggccagaccgtggatttccagtgtgaagccaagggcaacccgccgcccgtcatcgcctggaccaagggagggagccagctctccgtggaccggcggcacctggtcctgtcatcgggaacacttagaatctctggtgttgccctccacgaccagggccagtacgaatgccaggctgtcaacatcatcggctcccagaaggtcgtggcccacctgactgtgcagcccagagtcaccccagtgtttgccagcattcccagcgacacaacagtggaggtgggcgccaatgtgcagctcccgtgcagctcccagggcgagcccgagccagccatcacctggaacaaggatggggttcaggtgacagaaagtggaaaatttcacatcagccctgaaggattcttgaccatcaatgacgttggccctgcagacgcaggtcgctatgagtgtgtggcccggaacaccattgggtcggcctcggtgagcatggtgctcagtgtgaacgttcctgacgtcagtcgaaatggagatccgtttgtagctacctccatcgtggaagcgattgcgactgttgacagagctataaactcaacccgaacacatttgtttgacagccgtcctcgttctccaaatgatttgctggccttgttccggtatccgagggatccttacacagttgaacaggcacgggcgggagaaatctttgaacggacattgcagctcattcaggagcatgtacagcatggcttgatggtcgacctcaacggaacaagttaccactacaacgacctggtgtctccacagtacctgaacctcatcgcaaacctgtcgggctgtaccgcccaccggcgcgtgaacaactgctcggacatgtgcttccaccagaagtaccggacgcacgacggcacctgtaacaacctgcagcaccccatgtggggcgcctcgctgaccgccttcgagcgcctgctgaaatccgtgtacgagaatggcttcaacacccctcggggcatcaacccccaccgactgtacaacgggcacgcccttcccatgccgcgcctggtgtccaccaccctgatcgggacggagaccgtcacacccgacgagcagttcacccacatgctgatgcagtggggccagttcctggaccacgacctcgactccacggtggtggccctgagccaggcacgcttctccgacggacagcactgcagcaacgtgtgcagcaacgaccccccctgcttctctgtcatgatcccccccaatgactcccgggccaggagcggggcccgctgcatgttcttcgtgcgctccagccctgtgtgcggcagcggcatgacttcgctgctcatgaactccgtgtacccgcgggagcagatcaaccagctcacctcctacatcgacgcatccaacgtgtacgggagcacggagcatgaggcccgcagcatccgcgacctggccagccaccgcggcctgctgcggcagggcatcgtgcagcggtccgggaagccgctgctccccttcgccaccgggccgcccacggagtgcatgcgggacgagaacgagagccccatcccctgcttcctggccggggaccaccgcgccaacgagcagctgggcctgaccagcatgcacacgctgtggttccgcgagcacaaccgcattgccacggagctgctcaagctgaacccgcactgggacggcgacaccatctactatgagaccaggaagatcgtgggtgcggagatccagcacatcacctaccagcactggctcccgaagatcctgggggaggtgggcatgaggacgctgggagagtaccacggctacgaccccggcatcaatgctggcatcttcaacgccttcgccaccgcggccttcaggtttggccacacgcttgtcaacccactgctttaccggctggacgagaacttccagcccattgcacaagatcacctcccccttcacaaagctttcttctctcccttccggattgtgaatgagggcggcatcgatccgcttctcagggggctgttcggggtggcggggaaaatgcgtgtgccctcgcagctgctgaacacggagctcacggagcggctgttctccatggcacacacggtggctctggacctggcggccatcaacatccagcggggccgggaccacgggatcccaccctaccacgactacagggtctactgcaatctatcggcggcacacacgttcgaggacctgaaaaatgagattaaaaaccctgagatccgggagaaactgaaaaggttgtatggctcgacactcaacatcgacctgtttccggcgctcgtggtggaggacctggtgcctggcagccggctgggccccaccctgatgtgtcttctcagcacacagttcaagcgcctgcgagatggggacaggttgtggtatgagaaccctggggtgttctccccggcccagctgactcagatcaagcagacgtcgctggccaggatcctatgcgacaacgcggacaacatcacccgggtgcagagcgacgtgttcagggtggcggagttccctcacggctacggcagctgtgacgagatccccagggtggacctccgggtgtggcaggactgctgtgaagactgtaggaccagggggcagttcaatgccttttcctatcatttccgaggcagacggtctcttgagttcagctaccaggaggacaagccgaccaagaaaacaagaccacggaaaatacccagtgttgggagacagggggaacatctcagcaacagcacctcagccttcagcacacgctcagatgcatctgggacaaatgacttcagagagtttgttctggaaatgcagaagaccatcacagacctcagaacacagataaagaaacttgaatcacggctcagtaccacagagtgcgtggatgccgggggcgaatctcacgccaacaacaccaagtggaaaaaagatgcatgcaccatttgtgaatgcaaagacgggcaggtcacctgcttcgtggaagcttgcccccctgccacctgtgctgtccccgtgaacatcccaggggcctgctgtccagtctgcttacagaagagggcggaggaaaagccctaggctcctgggaggctcctcagagtttgtctgctgtgccatcgtgagatcgggtggccgatggcagggagctgcggactgcagaccaggaaacacccagaactcgtgacatttcatgacaacgtccagctggtgctgttacagaaggcagtgcaggaggcttccaaccagagcatctgcggagaaggaggcacagcaggtgcctgaagggaagcaggcaggagtcctagcttcacgttagacttctcaggtttttatttaattcttttaaaatgaaaaattggtgctactattaaattgcacagttgaatcatttaggcgcctaaattggttttgcctcccaacaccatttctttttaaataaagcaggatacctctatatgtcagccttgccttgttcagatgccaggagccggcagacctgtcacccgcaggtggggtgagtctcggagctgccagaggggctcaccgaaatcggggttccatcacaagctatgtttaaaaagaaaattggtgtttggcaaacggaacagaacctttgatgagagcgttcacagggacactgtctgggggtgcagtgcaagcccccggcctcttccctgggaacctctgaactcctccttcctctgggctctctgtaacatttcaccacacgtcagcatctaatcccaagacaaacattcccgctgctcgaagcagctgtatagcctgtgactctccgtgtgtcagctccttccacacctgattagaacattcataagccacatttagaaacagatttgctttcagctgtcacttgcacacatactgcctagttgtgaaccaaatgtgaaaaaacctccttcatcccattgtgtatctgatacctgccgagggccaagggtgtgtgttgacaacgccgctcccagccggccctggttgcgtccacgtcctgaacaagagccgcttccggatggctcttcccaagggaggaggagctcaagtgtcgggaactgtctaacttcaggttgtgtgagtgcgttaaaaaaaaaaaaaaaaaaaagaatccctatacctcatttgtatttttaaaatgcgtgatgttttatgaaattgtgtccattttttaggtattagatatggcagaaaaaccatttccactatgcaaagttcttttagacgtcagtgaaaatcaactctcatacctcatgggtctctctttaattgaccaaaaccttccatttttctcttaaatacaaagcgatctgtgttctgagcaacctttccccgaacacacagcttcagtgcagcacgctgacctgagtatccaccaggtgccaggcacagttgctgggcnnacggaggcaccaaggtccgggccacctgcccgcaggcaaggcccagctgaggtggtgggaggggagcccctgaggtcaggggccgtttcggttcagggtggcaggtgtccagcactggggtatggcgtcgaggcttccatggggtgggggaggccagcttccttctgacaggatgggcgcatacagtgcctggtgtgatttgtgcacaacccgtgttccaggtgcacatcctcccaaggagacacccagacccttccagcacgggccggccaagttgctgcggcggaggcagcatttcagctgtgaggaaggtcattggattcatgtgttttatctgtaaaaatggttgtcttaacttcttaactcatattggtaagtgattgataaaaattggttggtgttttcatgacatgtggacttctnttgnatagaagtcaaatgtagtgacaatttgtggaagagattcttgtcaaagtgaaataggaaatgtgtaagttcgtctaaaagctgatggttatgtaagttgctcaggcactcagatgacagcagattctgggttctgggagtgttctgtgcctcttacatgccctggaggcctcatggtctcagtgctgaggcggcacacctgtagcacacctgcgtaatgtgcggtctgggccagtcacaaggaattgtgttgtctaanccaaagggggaagctgactgtgtattaccaaaaaaaattctgtaatncaaaccnaaatgtctgcggaatcaccagtttgatactctctgtaatcagagcagtngnctgagggcggncagtncctgggtgaacgtgtctagcagccactgtgggggatcgctgtaacaggagtggaatgtacatatttatttacttttctaactgctccaacagccaaatgccttttttatgaccattgtattcagttcattaccaaagaaatgtttgcactttgtaatgatgcctttcagttcaaataaatgggtcacattttcaaatggaaaaaaaaaaaaaaaaa

SEQ ID NO: 68 - DNA, 73465 bp, Homo sapiens
  Genbank Accession No. AL109748
gaggccttgtctgattgggctgggttactggtgaccaggtcaaggggtgctattcagtggaggcctggccacatgggacctagtcagcagaggcgcttgtcagtggggccctggtcagggcaggctggtcaatggaacctaatcagtgggggcctggtcagaaaggacttgatcagtggtggcttttgtagcactggtctacggggtgaccaggtcagcggggatctgagcagtgcgtgcctgttcagtggggcatactcattagagtcccagtcaggggcatctggtcacctcaggcgtggttagtaggagcctggtcactggcagcctattccctggaggcctgctcagtggggcttcatctgtgggaccaggcaatggggtcattatcggtggaacctgatcagcgaggccttgtcagtaaggacctggtcagtgaggccttacaagtgaggacttatcagtaaggtcctcatcagtggagtcctggtcattgtgggcctgtcagcgggaatctagttagtgaggcctggtgatgggggtctagtcagtgagggtgtggtcagggaggatctgatatgctggatctggtcagcagggacctgttcagtgggggctgctgagcactgcagggagatgtcaggagaaatgcatgttatcgaggaccctgtggacagctgggatggcccagtggtgttcaatggcccagtcaaaagtggacaaagcaggtgtttggatggacctgggagatcttgctcagggattctgacaggacaaaagtaaaggaagtaccagagtggccagagagatggtcacagtctatgggctgcacaggatggaggaggccagggaacaggcagggtgggcagctgagtttcagggagagacatgtgcatgctgggaggtcagacccagtgagggctgttggggcatcaggtggactgggctccaggtgcaccgtcagtgcactgggcaggtcttggcccaggctccctggaccctggctgggtgatgtggtcatttgctgggggactattgtcaggctctggctacccaacctgggtagcactgtcccatctcaggactgcacttcctcagatcctgcagagggcacagcctccagcccaggaggggcagccccatggtgcagactgagctctccatgggcctggagaatcccctgccagccctgcactccctcttctcccaggtcccgcttttccagggtcagccagtggggaggccccatcctcccttccctatgtgtctcctgggctgaaacttgcagtgcactgggacagggatgaggcttccctaaggcctatttagggaggggactggcttccagcctggcacaggtcctcagctctgccttggttgccttagagtgagatggatcagtcagtgccctgaaggtaaaggtaggagactgtccctgctgttgggaggctggtctagggatggaggacttaagaggtcttcccagtctgtcaggcctgggcagtgttttcctgtctgaggactcagaaaatccagtcctgggatgggacagtgctgcccagggtgcgtggccagggtctgacagtagtcccccagggagtgaccacatcacccagccggggtccaggaagcctggcctgagacctgcccattgcactgagggtgtacctgaagcccactccacctgatgcccccacagccctcacagggcctgacctcccagcatgcacctgcctctccctgcaccctagctgtccacgctgcctgttccctcacttcctccatcctgtccagcaggatgggatgggcaggaggacagcctttgtgcacatttcatggcaagtaggagtgacacaccatccctgggaggtgccttggttcctcccaaacccggccccagaactctgtccctggggtggttttaccataccccaaacccagaactgtggttgtggctcaggggtcagcacccactagtgccgggacactactgggaggctgggatctgaccaaagcccgtggtgcctgtggcctgaggacagggtgtcttggggccataaggacaggccacaagttcccattgggtcataggggctcagccccagtgtttgttcttccctggctccctcccatcagtgccctggagcccaagaccaagcatccaaggttccctccaggaatcctggtggctcagcttactttgtcgtgtttcatctgagagcaaaaatgtcagatcggatgcacagaaaaatggctcaacatgcttaatgactagaagaagtctagaagcagcaagaaggtaatgtggagaggggaggacctccatgggacttccatgaccggtatctgcagagccaggggtacaggcacccagtgctgtggactggcaccacctctcagagggtgggtagcacactgtccttacctgggggacagcaggcctggtcaccagcttttgtacctgtctctgcaagcattgcattgctggaagagaatctcatgccagagcttgaccatgccttgctcaggggttaggggttgtctcttggtgacctaaatgaaaaaaatatctccagatcatagttcccacagagcccaaggctggaaacctccagaatcctctggccccagatcctccccagggacccctgtggcttatctcaccagagcattcttccatctgtagatttcttggctgctccacaagggagtcccacttcaggtgtggtgctgggcatggtcactcctgctggatgtttagaaggtggaaaccaaggacctagggaaataccaggtacagcctttccaccctcatccagagaaggacaaagaggccaggcggtgtcaggagcccaggtctccagctggaggtaacgtcaaccccgcagtgagagcaggggcccattgcacatcctaggcagagatggtaacgtaggcaccacaggtatgcagggattggtacccctccctggcgtcagaaagaagccaaacaaggagctttctgcagaatgaaacctttcctttcagaagcactgctgacagtttggtggttgccattggggcagtgagccttttgtccattctgaggttgggctggtttctcctcttggccgtgccctacagaccataaaggaaatcagctagaagtccccagaaacatccacagatggccctggacatcagccacattctgagaaacatgtcatgttctgggaggtctaaggcatcaagtaagtcttatggggctggaggatcccagggcaggtggggcaatccagagccatgggggcttcccatgggaattgggaggtcccaaggcagatgcaggggttccacaggaggagtcccagagccaccaagcgctctcctgtcccagggagcagtcaacaccatggactgaacagttactgggcttcaagctctgggccaggctggggcatgtggggccatgagggagctcagagtgggagacagagagacaattgtgctcagagggcacccatttctgggtgtaatgtggtcctgagattttggctgagaagggtttccagggtttcatatgtgttatggagctgcttcctctccccagcctcaccttgcaggaatcccagtgaatatattgccaccctatttgagctcagtgccctcatagtgtaatggcaccagcagatctgcctgtgcatggacttcctgtactacccattcctgaggggtgatgcttctgcagggcctgtgaccttgtgcacaactttagacaccatcatcctggagcagccctgcaccctcactagccagggtgttcatgacttcctcaagaccaaggccacgttcaagacttgggacttcagtgatgcacttgtgctgggcaaggtggcttctccagtatcttaatttgggaggtagaatgcagcttgagatcaaatgtctgatcaaagaacttgaacttgagctggagggctctggggagccatagaaggtgctggataaaggagggacagtcagatatattttagagatgactgtagaaggctgcctggaaggagtgaacaagagccaggagacccgggagggagcttgtggggcaggtctggagatggcaagggagggatcctgcttggatgaaaagtcttcagggactgtctcaggttacactcaggtgccctcagagctaatgtgttcagaggtcttgtctccaggatgaaaatgggaaggagttgtcagatgaggacatataaatggaggctggcatcttcatgagtaccagcggtggtcccggtgtgggtctctccatccagggacatggtggatggacactacatcactccattctgcccttcctttccctcctcccattctcccgagggcctcagtgcatgggcgctgtccaacctctggtgctgaagcagccaagagacgcaagcctgcgtggctgcctcttaggatatgacagcacagccactggcctctactgaatcctatgcaacctcagaagacacccaggagtgatgccatcatgtggtgcaagagttctgagggaccacaatcctgaagacattgaatggtgggtgcagggcctcatggcctgttccccagctcctctcattggctctgctccaggtggtgaagggggataacatttctgtcaattctgccacgattgcctagcaggaaaaggagcagagcccagaagcagggcctggtatgcagcctgcctaacaaggaagaatttataggctctgtggacagaaagatctgggagtccatatctatcacccactagcttgctgagacattagtaaagtcagttttctggactacatttctgtcatctgtaaattaagaggaatttcttctaccccacaaggcttcttggataattagtgacagtgtgtgtagagtaggtgccacccagccagcatttggtgtccagaacactcctcttcccccttgattttctgcctaaatttgcattttcttcttaagattttcactccccttaattctgctcttccctctgatttctgccttactgtatatcccatggagtcaccaggatcaaagtgggtaacagtcatgtatgcatgtatgtgtgtgtacatatacacattgttggggctggagtgtggtgtgtgggtaagtgtatgagttggaatcactgactgaaactctccacaccaggctgtgttcctgctcattgctggaggtactgtcagggtccctgtcctcaacccctggtctgacacttgcagatcaggcaggacattctggaggaatcatgcccttggaaggatccctgaggagtgactggtgggtattggtggataaataccccagctcccttgctttgggtgggtgactctgaggcacatgttctgtgctgtctctgcagatgtacctggcagggctgagtcctggctgccacaggggaaactttcttgatgaaggtccctttaactgctgcattcctttcctgtctcagttccccactcctctactggtgtttcctgggatacgcaccctaaggaagaactggcagtcgaattactatcctagagttatctccaaatagaatttttgtatttgaatatttgcctcaggatctacttccaggaaaattatactaaggcacacatttttctgtcagctccttcaatccccataggcctgccattgtgctgtttttatcaaaagggaatatgaggatcagagaggggaagtcacttgcccaaagtcacccagctgaacagtggtggagttcaactttgaccatgggaagtctggccccaaggtggatgcttgtttgtatcccatgagactcctcccttaccagggtcaaatgaatgaatggaggatgttaaaagtagagtctctgatgcctctccagagaaacccaggctcatggctggcacctgtgttctcactcttacctctttaagagtataatgaaaaacatgctcagtgctgactgtgtgcctgggggtgttgtaggcactctgcttactttaattcatttaatttttacaataaccttgtttttacttctagttgttagattaaaaaacagtggcaaagagcaatacagagagttgccaaaattcacaccgctggtccaggtttgaagcaagcagtctgtacctgcagtccttgtctgtaaccatggcaccctggcttctcacacatctcatcgtggagttccaccatgtgtcaggcatggcactgagcaccttcttttaagaatataatttgtaattatgtagattattaattctacttcaaaatgccacacagccttcatgtgataaaatgaaacaattggtgagtctaagcattgagaaaaaacgttcttttttccactcccgactccattccaacagttgggacagtgttttctctgtgcctgtagaaacctcagctcctgggctgaggagcctgttccctttggggaatgtggcagtcaggtactggcagggacctcgaagcggctgaagggtcattaagaaaaagctgtttacataggtgtgggcagggccaaggggaaccaggggtgatggcgcagggccctggggttagcgtcatctgggagctgtcaccaccctccaggctggtggggccatggagaagctgttccagtaactcggagaatctgcagctgaaagaggaggccagaggagacatcactcactgtgccctttgactgcatctggatgcccccactgaccacactaccatccccttattagactggagaggctgcagggaggggttctaagcctcctatagtggctcacctccaacagtgagtcagcaccagcccccctagtcccacagcacagggtccacttagacactgtatcctgcgtggtcccctttcctgctgggaagcagatatccaaatgagcagcagaatcctgtctctcccttcaggcccctctgctccttatgagtggtgttttcccttggttttggatgagaaacaccctttccccttccagagggattgtttctgtggaccccaccctgagttttcccctggttaggcaacgggcaggtgggggtggtggaaccaactctttagaaccagcaatgacaaacagatcccacttgggggaagttgatgttaagtgtcatgggtcctctggaattttctgaagctttcctgtttttttttttctccccctaaccagctcaactgatctcctgggatctctactaagatgttggcagcccggccagctggtctggccctggacgtgccttcatggtctggttatgcttcatgacctgcactgtggtcagtggtaagcagcacctgcttctagctttactgttgggtcagattttatccccactccagctctgcagtgcggctgcttcttgtttcatccatggaccctgcacgaaattgccccatgtttctgtttgtgcatcactgagaaaggaagcatgaaggacgcacaggtcaggccattccattgccctcctggtgccgggtttgccctcccaatcctggggttgcttcaggggcttgtcattctccatagtcccctccacatttctcaggtttctgctcaaaagtcaccttttggaggggtctccacctgtcactgtgtttgtaagagctccttcagtttctttctagctcatctcactctggtaatgtctttgattaccaccaccatctgacctggtcttatgacctgttagctttcttcatcagacgtgagcaccaggatggcaggggcctcatctgtcctgttcctcctgtggcctgggtcctagcaccatgtctggtacagtgtagatgctcaagggaagtttactttgtagaaccacttacctgggagatgttactgttagtctaacctgtaccattttgtaaacctccagccattttgcagactctgatcacagtgaaacgttccatgggaacttgggccatgagaaacatccttcctaaccacgtgactgcagaaacatccttatcgcgtcctcctgggcaaaggcccaacagcctgactgcagggacatccttgccatatcctgctgggcagcaagctctaccacccagatccctccctcccagtcccatgattaccccagcctgtgagtggcagttggtgctggcactaagctggtttcctcctccccagggttttgctggcaataaagatgttgctgttgaagccaccaactgtctctctgtctttctttaaccctcgccttgccttccaaacctaacaataactctacctctccattttaccaatgaggatatgggactcaaggagagcaagagatttacccagtgagtcacagagcctgaacttaaactcagttcagctgaatccagaacttgtttctcccgagagtccagggaaggaaaagtggaactgcagccagtaggtgcccacatgcttgttctagaagaccccaggcgggctcctgggaattgcatcttcatgcacacaaaagaagaactgctcactgtcgcatcagctaagggtccccattgtcctaaattgttacttcctttcaaagttttgttttaataattacagttgtcacagctcagtgttgaatacaaagcacagaggcatgtagaaagtcgtgtgtgggtttttctcaatttttttccccagtgactatatcaataagtttacaaaagaacacaaatatgctcatactttttatatagagatgaggccctccctcccatatttctctgccactattcttccatttttttttcatgtgaggaccactctttcaatactagtccatgtgattggggtgaggctggccaccctgggcaatcagcagggtaattaattcagggacaggcatgtgaaccaagctgggctgatggaagtcatccctgcacttttgatgaaactgctgggaatgaggtgctttctttttattggcacagttacttgcaaggaagtaaattatatggaatttatggggccatttttgctgttctctcaaaatagcttgcatgaaaagcagagctgacacaggaaatgaagggacagaatgagtcttggttgatattatttgacccctgatctcactgagccagaagcccatctacttaaggatatttttagtaattagagtcaagtaattcaatgttctcctggatcgagtaggtttcagtcacttgcagttaagagagtcctgcgtaatagcaatttctcttatggttaggtcccacctgccagagctttagagctgtagaaggtataaagtaaacccaggcagtgctgagctagccaggctcctggataagtgtgcaaaggaaccctggaatcactaccaccttggtctgacaagtagccttgcctgctgcttaccatacagccataggggtactgtttccctgagcccttagacattataccactttttaaaaatgatttttatctaagaaaatgttttgtagagatggtgtcttgctatgttgcccaggcttgtcttgaactcctggcctaaagtgctgagattacaggcatgagccactgtgcttagccagcactatacttctattagttgtcaatgttttcttctgtagtttctagtgtgtgcttgagcatgtgtgtgtatgtgtgagtgtgtgtgtgtgagtgtgtatgagtttttagtttgatcttgcagggttatttcaagcatcaagtgggatcctttaggcacagcactcagcccagtgactggcacatatggtaagctctctctgttctcctcttttctcctcctgattcagagaatgacttaaggatctgtgatgtgtgccaattttcaatgccctggataaataatggggagatgaagtactgttgccagaaatttgcactagttttaattcattttatctgtttagcaatgagatatctcaaagtaactgaatgaatttatgtcatatatatatacatacacataagtatgtttcttgagagctgacaggcttagtttttgttccctgatgctgtggtagaggccactgtgttctgatttcttgagtgatggctgccagctctccaagtgtcacagttggtgaggcatccatgggggtgagcaccaaggatgtgtggccagtcagcatctgcaagcccattttgtctattctccttatttttataatatgttttattcatttttaggtttatcatttaatttattataagtatctctcctaaaattgtttcttagttctactaggggttagttttatgaaacaagtccagaaatagtccagggcagccatggatacccaacatgccattggggagtgagaaatcttgtatattgaagattgtgttgttgggagcatcattccaatggtcttcaaggtgctaaactggactcagggcatttcatcctatttccagagagcagcaagcagagagagcaaagggaatatgattaagggaaaaaaggaacaataactcttccctttccaaacagattttcagaaatccaaaccagtgaattctgcatttcacattggccaagactataagctctgctcactgcagttatgagaaaaactgggaaactcatttaaagacattaatcagggccaggcatggtggctcatgcctgtaattctggcaattttggaggccaaggtgggagaatcacctgagcacaggaacttgaaaccagtccaggcagcataatgaaacccagtctctacaaaaacaaaacaaaacaaaatctgactgtggtggtgcacacctgttatgcctgaagtgctacctactcaggagtctgagctgggaggtcacaggaacccaggaggctgcagtgagctatgttcatgccactgcactccagcctgggagacagaccatttttcaaaaacaaattataaattaaataataaaataaggataaataaataaagacatataaactgtgctccttgtaaaagataaatctatgctcccttagtgaagaagatgagaataatggatatagcagggaaatggacagaaatggccatattagaccataatgaaagtcataataggcaccccaaatcagtaccattaaagccacataatgtgaccataatgcaggcaaattgtgaccaattaaaacaaactgacaaaaaaaaagggtatcctggagcatacaaattctaaatctaaattgaatggaactcaaagagggcttcacattgaaaataaaaccatgggtatgtaagtgaattgtaacaaagctactacatagcaacattaaggtggcagagcagaaagggggctaagacagctatctgtcattttataccatttttttaagaaaagaaaaactataaaattatgaatttgggttctaattgagatataagacaatgataattgcagtaactgttaacatttacagtgcttcagtcctgctattgctcattcatgcctaataagtgaagagctggaactgaaagctttcttatatttattcccattgcagtctccctccagagtgtggattcatgtgtaacaggagggataagtgtttaaagaggtcttttctacattttttacttccataagcagtctctgcagtgtgagttcttgtatgaactatgagtctgaggcaacactgaggcttttttcatgttccttactttcatagcttctctccagtgtgagaacaaatagctactcaagatgaatgaagatgaatgaaaggctttccatagagtttaccttcacagggtttcttttcacacttctgtaagatatgagagttcaggaaagatgttctcatgcatgttaactcattgagctcccttccagtatgtcctcctcacatgttcagtatggtgaaaaattaatgatgattttccacctttcactcacagggcttctcactattgtatctcttaaggtggcttttaattctgatgactttgcaaagtcttttccacatttgtcacatttatagggtttctttccagcatgactccttatatgtgcatgttttgaggcttgctgaaggttttcccacattccttgcattcatagggcttgtccagaatgttctttcttaaatgtttattaaggtgtagggaatatctaaagcctttgccacttttgtcatattcataagatttctttctagtgtgaattttcatatgtctcacaagaaatgacagataaataaaggctttcccacatttgggacatgtatggcttttctctccagtagtactactgccgtgtgaaccagaatttggagcaggggcagaggttattccactttgatgattcttattctttgtctctacagtacaggactgcatctgcacagcatggactgagttatttctgaagacattttcatattgaataaagttatacattttctcccaaacatgagttatgtgggccctaaggcatacatcttcactgcaggctattccaaatggactccactcatgcatgtttgcagttgtattaattttactatgtatatgatggacattgttctgactgtctatccatgtgtttgattttagctgtttttctcccatatgaaacccagtgaatgttgtacctcaagactatcatattcattgttttcatacatatcactttatttcaatagtttttgggaaacaagtggtttctggttacatggaaaagttatttggtggtgattttctgagattttggtgtatgcactactcgagtcgtgtacactgtacccaatgtgtagtctttcatccctcaaccccccaaccttccctccgagtgcccagagtcccttatatcattcttctgtctttacaccctcatagcttagctcccacttataagtgagaacatacaatatttgtttttttattcctgagttacttcacttagaataatcatctctaactccatccagattgctgcaaatggcattatttcattcctttttagggctgagcagttccatggtgtatctataacacattttctttgtccactcattggctgatagacatttaacctggttccacattttagcaactgcaaattgtgctgctataaatgtgtgtacaaatgtcttttcatatgacttattttcctctaggtagatacccaggagtgggctaatacaaatttaaatagaaataattataaaataaagtaatcaccaagtgaaaattactatttctagtagtaaaacaaaatacatttattgagtaaaatttgaacatatttctgctcacataaaggatatgtaacttctgtattttgtataaatgatatgctttatctcactagactcatcctgtggttaatttgtggggaagggcaggagaaaataacatatctttaaatttagcttcttgattcacatttttcttcaagtttcaatagctctattttaggaaaatgcctccaagaagatattcagatgctttgggctttctgtggcctcaaggcaaagtgaaagtgagtctcaagtctcctattgtcttcatgctgttctctggatctctgctttctctgtggcagagggtctctctggtctgatcgctgaggccattgcattgcttttctctgagatgaagcttgtactcttgaatcagagtacagtggaattccctgcctcctgttggcttggataagatcttcagatctctctgagtttcagcatccttcttcttccacagtgtggctggcattgtcacatgtggcctttttggccagctcattttgccccttggtgcagtggccccatgttgtgtatgttagttttcaactcagttaagttgcttcctatttacctctatgacacttccacattgcatagattcataggtctagcaagaggtttttttatataaaccaagctgccagaaacagaagaatgctcacacagtaagtcagataaaccaaatttatcactcacagaggagcaggaagaatcagcaaaagcctaagttctatggcaagcctgacccttgaggtcagaaaagttgcccagggttgatggagtctcctctgcacatgctccactgtgtactgcagctgaggaacccctgagtgctctgccctaggtttcactccccatgtgctacttggctctctgagtttaagagttgcaggaatatcctgttctaggaacaacaagggcagagcccagactgtcccagacagtttctccttatctcaggatattgtcttctcggaacattctaaaattattctgagaaccaggaggtacagaaagctgagttggccaaggccattcaggtcttgtcctcctgaccacataaacaaagtaggctataaaacaacaagcattagcagaaataatcatattgcattatcatagcccttctttattatgataaaaagaatttatccaccaaaaagttttctgaactctaaatctgaatgaacccaacaaaacagagatttgggcctgttgttacaatttaataaaggatttactaaaccaaaaaatttacttaaatacataaactctggaaggagtataaaaatcataaagattcatttcaataaaggctggcatgcaaggttatcagacatgtgacagagtagtagaaaatgttgacagtgcttagggcacagtgaatatgattgattttcaaatgaacaaagaagatagtcaactcaatagaaagatgggccgaaaaattccaatacattattaacaatatgacagatgcaaatgtgcacaataaaatgagatctgtattttcaccactcgcttagaaaatataagaatcctacgtaacattgtgtgatgaggatatgaggaaaacaacctttatgggcaatggatgggaaattcaatggttttaaacatttcagaaaataacatgacaggacccatctgaaagtatgcatactctacaacctgtctcaatgacgggcacatatacctgatatagtttgtatgtgtgtcccctccaaatctcatgctgaaatgtgatcccccatgttggaggtggggcccagtgagaggtattggatcatggggtggatcccttatgaatagtttagcacaggaatgtccaacttttggcttccctggaccacaacggaagaataattttcttgggccacacataaaatacactaaaaatagctgctgagctaaacacacacacacacacacacacacacacacacacacacacacgcacacacacacaaaatctcttatgttttaacaaagttgacaaatttgttttgggccacattcaaagctgtttgacctgcattcagcctgcaaactgcaggttagacaagcttggtttagcactatccccttgtgagtgagttcttatcagtgaggtcatgagagatctgattgttaaaaacagcctgggactgcccccttctctctcttactccctctctgaccatgtgacacactggcttcccttcaccttctgccatgattgtaagcttcttgaggcctcacccagagcagacgccattgcttcctgtgcagcctgcagaaccctgaaccaagataaacctctttttttaaaaaataaatgaataaattacccagcatcgcgtgtgtcttcatagcaatagtaacagactaacgtagaccctgccaaattgtgacacatgaccaaaaagtgttttcataagaataccacaaggaagtgaatatttcagtagcaggatatcagtgtgaattctactgcaagactggatagggaaaatgcggttgattcattttgtccaaaactatgcagcagctgcaggggaataaacaaccaaaaataacctacagcagtgtgggaatatatgaaggatgtgatgctctgtgacaaaaatagaaataaaatcagatttatggcacgatactctttaagaaaaatgtatacacttttgtatatacacatacacacactcagaaaacaaccttcttatcttgtaagaattctttaagagtaaagaacttatatcaaacacattagcatgcctgtctgtgacaagggataaagaataaaaaaattgaataagtaaaaccagaaagaaacttttaggaaacaataataataatgtctcatgtagtaaagaatatgattaattttttgcaactgtggtataaaaacagaaactgtcaaaatcacatgtaatgagctttagtatagagcttattgtagggcaaaaatcaaattttaaagacttagtttgcatagttggatggaggaatggtctcctatgtgaagtagtaagatacacgaaacaatcccatgggtgtatgggaagaaaatactcaaaatgctacttatatttatcttttactcatttttccaacagtttagtatctaaatgctaggggaggccagatgtggtgactcacacctgtaatagcagtgcttgagggtggggggcaaggcaggaagaacacttgaggccaagagttctaggccagcctgggcaacatagtgggtttttgtgtccacacacaaaaaataaaaattagctaggcatgatgctatgcacctgtagttctatctactggagaggctgaggcaggaggatcacctgagggaggagtttgaggctgcagtgagccatgatcactctactgcaccatagcctgggtgacagaatgagaccctgtctcttaagtgaaaataagtaagagctaggagaccacatgattttctagttttcagcccctattgaagttccctgtagattattttgcttattcccaatgttccaggtgtttctccacattgtaggcttgtccttctacctactcaaggccccagatccagcaaatgtcctcagagatggactccgctgctaatctgtgatcacctaggaaaggcttatttttctctgaaatttagttcattgtaactttaggcccatagtgttttgatggctttaaacaaaaaaaaaattttaagttcatccaatgtcttctcgttatggcaggagcaattgcccttggtaactttattttaattggaagaagaatctctaatgtaggcattgtaatgaggtttttggtctttgaccttactggagcagttaaattcaagtctatttcctatattattcatgtattgaaggatcaaatgagaaaatatatgtagagtgtataaagtgtctaatgtacactactgatatacagttgtattatgactacacactgaaaacacataatcaaccagattgcttcctgagacctagagccaggcttttccaatgattcttaactgtcaaataattctattcaatttttcatgggacttagggtttggtccatgaagtgttgccatggtatgcaaatcaattatgtcaataagcatgttagtttattcagcaaatatattcttgtagcaatagttactcaatgaaagaactaatatatttaatttctagtagaagctacttctgtcattgtgaactggttacaaaccttgaatgctctagctattttgaggagcattaataggcattacccaaagaagatgatatattccctagacagcaagaactcttattcctgttaatcttctttttgataaactctacagtctctttgtagtaaatccaggttctgtgggatgtacaaaacaatcccccataaatttaaatttatacctatgatcatgtgtaatgaaattagccctcaagagccaacttgagaccatgttcagaatggaagcttcagaaacctatggcacatgaatataagaccattttagacacagtccccaaattacctctgaattcagtgggaaaaaagtgacaaggaacaatatttagggcatctaggatagtgctaccttctcgtgcctaacataagcaaattaaaacctcatactaatgctctgaagcctaataataactagtaaggttcatgtctgtcaaaaagccactgcaggctactgttaaaaccagctacacaaccatctgaaagccatttgcctccctctagttaaaaacagtcccatgtctactgatgatgtagttaaggctgtatcaagatctatctctcagcagggacatgttccccaaatgctaatgtttgaccaacaaaagttttgcagccagagcttgtgcaagtattggtagatagaaaatacaaaatcaaaccatttctcatgaatgattaaacaattaaaaaaataaatgcaagaagcttgtgtgcatgtgcatgggtgtatgcatgtgtgtgtatattcagctttgttatatttatttaactttattaactttgtttaaaatttaatttgaaaattagattggggagcaaaatatcattctttctctctcatcataaaagttttggctcatgggattctgacattctgtcatgcttggaaaagttggatttatgaaaccagtagctggactgagcctgcctatgcagctcttacacaagtgcttcctattttgtgcacaagcagcctcaagaacccaaagatagtgattgagagagacaggctctgaagcctttttatttcaacttcttggaatcaccaccttgctaataaacatcaaaatcttctgtgtcatttatcagattaattactttttccataaaaagagtgagttgagaaactaaccagcaagaaactccctgtcccttcttcatcctgaaaacaggagaatcaatatcttaaccctgtttttgagagatgaatgggtaggtcaatattgcttggctatttgtccttccacttgggagagattactgctgcattttcccctcaatctctagaatcatggcttatagaaaacaattatgtactgaattactaattgcaccaaaattttattagacttcttatcaaagagcatgctcagatttatttattattaatagtaacaaaaatataaaaatttgaaaacaatattataaataacagagaaaagctatgcactgttatgaaagcctttcatatttagggatatcaggtaaggcttctcttggtggggaagatgaagagcaaactaaaataaaagtaagagctaattatgtaaatctgggatggtagtgggaaaagcatatgaataagaagaccaaagtccagaaggcaagaaaaaatatatctgaatcatttagctcaataatgttcatgccacaagatgggggagagagaaaagaaacaaattttgtactgcttgaacccattttttgactcttgattggactcctagtaccaatgtgaagtctttgggaatttttaagccaagcaatttacaatgtaaattgtatttacatttcaagtaagtcattttggatatagcacagaaacatttttggagagagaatcagggagagcactttagaggtgctcactgtagcccaggtgagagagtgatggggtggaattcatgatggcaatgaagacagaaagagaaaaattcattcaagaaaaagagagaaggtaaaatctgacaacacttggtgactgaaaatggaaatgtgaagaagaaaatgtcaagaattacactgagatgtcaggtgtaggtagaggtcgacatcacttgctggaaagaaaaaacacaggaagaataccactttcagtgaaagagacatctgggttgcttaaagtatcatgaaatgggacttttccagttccacgcaggtaagttaggacggctcaaccttgaggcacaaaagatggtgatggtggtaacagtggccttgagaccaggacctataccagactctagaaagattagtgtgatttggagtagctacagaccggaatatttcagtgaaaaacaaaacaaaacattcacacttattcttggaatcttgctttatttgaaggagtaaataattgggccttacagctgtaagttttggtaagccctaaaatgaacagaaaattgtataaaatggaagcaattcaccaattctattcactaagcatttaatgattttcttccaggtttaagtattatgatagacattgtacagtaattaatttattgaccatcttctctggtgtttgtattaatacacaaagagatataactttaaaagtatagtattgctttcagcttacaccaatcattacccattatcccaattcattaaatcagattgtttcagcgataagttacattttgaagttaatgaaatacttaaaaggctgtgatgttgtaacttcatatgtagtatgcaaaacatgtttgattcatgttgttcaacacaatttcatcataaaatcttatctataaaacaatatttttacacacctagtattattctcttgctttatgtaaactttatgtctatcatttatctctatcaaataaagttatatttctagttttttattcccaaacataaatgacaccattaatttttacaaacattaatgatgaactatactcactcataactctttatgtctaagttttcttagagttattgaacaatttctgagtaactaatggctagccttttattattctatgatgataaatatttttcagtatccaggcttcagatatatttttgaaaacttatttctctatgggtcaaaatttaaatcagttgtaatatgtgatccactcacaaatatattctccaggctgagctattaaaatgaaataccaaagtggctccccaagacacccatttatagtctatacgtgcagtgcagggttactgaaccaaggcacagtgtaatcagggaaattttattttttgttttctttttcctaagatgttttttatttccagttatataaaaatgtatattacaggcaaagaaaaattaacatgaatggaagtaaatataaagtatattcacattaatatcagctttgctttatctattaaagtatataacaagcttgtggttttcaggaccttgtaactcctggttcattggaaagcacagaaattcttcagagcctcaagagttgtgtttaatgcactatttaaatagtctccaaccactagttagatagcttagcactcaaatagcctttgaaatctctgtagactcacctcagttgagcagtcctgataatttacagaagtgtgtagtgcattaagagatccctgatgtatgatgtctttgcctgtagagtgttttctgtgtttatccactgaagtgtgtgtgtgggtgtgtttctgtgtgtaggtgggtgagtatgggtgtgtgtgtgtgtctgcatgtaggtgggtgagtatgagtgtgcacgggtgtgtgtgtatgtgtttatattgtggtgtgtgtctgttggggtgctgccatcagggatttggaagactgagaaccataaacttgtaaacactcctacatgcctgcttcataagaagtgtattgaacatggccaaaagtaactaaaccaagtaagcaaattagacattaattaagtttaatgctgggcaggaaagaagtattaaagaccaggtaaaatgaagaaatataaccaaatgaatgaaaattttaaattgattagtagaatgagacaggaatattttttaaagtttataatttctaatgaatatcagtatacaaaactaagaattatatggctgtcaattgactaaaaactgtacttaagatttgagctagtgaaacaaccatatatgatcttctaattccacttttctgtctcaagaaggacttgttaaaatgatttttttttttgaaattttacattctcatcttgaaagagcttcacaaaacttacttgagaatctggattgtcataagaggtctgattttttaatggtatgtttgtatttctattatgtacatcaatgtcaagcattcatttcctgagctgttctccagaacacaatttaacttgtaatggacactcaataaatggtcggttggataatcaaatcaacaccttagttccatcagttttcatttcatataaaaatcactgatcttctatactcatcaatgaaacagagagatgaaggagggagaggagctgagactgagaggatgacaagcagacctcattctgcacttctgaatgcttggaaacacttgccatgctcaaaaaaattggtatttcctaggcagcaaaagggagttaaagaaagtccatatttctgtattacaataacttacactataatacacagatgacatacatttctaagctattcaattcatagaaaatgtagataaatttaggtgagcaagatgtaggagaagggttagtaatccagctgagtgtgattgtgagattaaatctaatattatcttatacaattgttgtataattgtatcagttgacatatctgttgtaacaaaaggtgggagagttttgcatgagcttctgaaatttacaggatgatgttaggagagaggttgatcaatgtggctaggccagatgtatttactaattgaggcttaagaaagttaagttcctaacctctcccagagactgggagataaaggcgctaaattgtataacatttatatttaatatatatttaataatatatataaagtcctaaaatgccaattttaagtcttttcattttcttcttaaaaacagaggttttattgtgtttggtccacagtcggtatttcacattatctcatgatccggggtccctgggtggggggccctgtgcagtacttggcagggcgtgtggttgggggagatacagcagtagacctggtcaggcccagaaggggagaaggagggctggggctccttaaaacctactgaggggctgggcgtggtggctcacacctgccatcccaacactttgggaggacgagacaggcagatcacatgaggtcaagagttccagatcaacctggccaacatggtgaaatcctgtctctactaaaaatacaaaaaattagccaggtgtggtggcacaggcctgtagtcctagctactctggaggctgaggcaggaggatcgcttgagcatgggaggctggtgcagtgaggcgagattactccactgtgcttcagcctgagagacaaagtgagactccatctcaaaaaaacaaaaacaaaaacaaacaaaaaaaccctactgagggccacgggggtaaggggactagtatggagaggggtcaggcttaacactaacaacggagaattccactaccttgtaggggcctgtttcctcaccgggccccagcgtaggtctgagggtctgaggtctgttggtctgagggtcctagggaaatccagccactcaggagcctgagatattttagcatcctggcctggccccctgtcccaagggactgatttcccagcacccactgtccctgccccattcctgggggaaaaaaaatttttttcttttgttaatacttcttgaaacttttgcgggtacagaaaccacaaactgatcggctgacaaaagggggaagaggcgaggcaacgggaaaccttcggggaccggttccctccatgcccaggtctcgtctccccagcacagctaggcccacagcctggacgcgccagcggggaccctcacccgacacgcatcgggatatggccttgatcccttcccccacagcccggtggctcagtcctgcaaaggaacgaaagcaacggggaaaaaaaaccctgctgcctgatcccacgctgctactcacagacgctccgttgactggcagcactgaacaggttaaaaaaaaaaaagatgaaaacacagaaaaacccaaacacccagacagggagaccatgtggggagagagcgtgctgggagcctcagtagctggtctcctcttggtagtaagggagatattcaggggcctccactggccccgggcagtcgcctgcacctgagggagccccgtgggccactgtgctcccaggcagtacttggggtcgtatatctgtcggcccaggctgaagacctggctgctctggttggtgcccagcgtgtagcccatcttcagggtcgtggaagagttgtcatacttgtgattcccagcttcgtgtcgtagatgtgccaccgggtcccaggagccgccatgcccacctggctggcacacttgcttgtacccatctggaggctgatggtcgagtggtccatggggggcaggatgttgttcttggggtcgtagagatgcctcctcgtgctctgccgtacacagtcgtgcctgactggctggcgcgtttattggtaatctgcagccggatgatgcactggccagccttcatggtggcatcgtcgaagttcccctcctgcttctctgagtactcctcaccgatgtccacctcgctctgcagccccttagtcttggccttccttgccagggcgagaagagacacctgcacctgcctcacgttcccactctcaaacaggtcgttggtctcaaataggtccacggggttcatgctgtagctgaccatggccttgaggaggttggagaggctttctagctggtaccagttctacactgaagcggttgatttttgggtactgagcccggctgcagtttgttcatgagtgtgcataagataatcccgtccttcaggcccttctggaagtcgggccgatggagaggccagtgagtccctagatccagctgcggagctctacctccttctgggagtcatatttggacaggaaccggttctggacgtccgccaagagcctgtaggaggggcctttgttgaactgcgtggagcttacagctggctggccccgtggcgggacgggaccacacgggaccggggactgtcttttttctagtttgcaagattttgttttcgccacaccattgtttttactacatatcttttgtgtatttaaaaaatgtgtgaaaaatgttagaccatctcccttttttccaccttccctttaccctttactgtgatttacatccacacatccacacacacacacacacatccacacacacacatgcacacacacatactgagcgaaattaatttagatgtacgaatgggttatttgaagcaaaaagtcaacctatattagtaaaagtgtcatgccagtgggaattacatttataatccttttaagaagaaagaacttccggccgggcgcggcggctcacgcctataatcccagcacttttgaaggctgaggtgggctgatcacgaggtcaggagctcaagaccagcctggccaaggtggtgaaacttcgtctctactaaaaatacaaaaaaaattagctgggcttggtggcatgcgcctgtaatcccagctattcaggaggctgaagcagagaattccttaaacccgggaggctgaggttgcagtgagccgagatcgcgccactgcactacagcctgggcgacagagcgagactccatctcaaaaataaaataaaatgttgaatttttacaagtcattgttcctattccaatttttgaatgcaaccacagcctctaacaaaacagcctccttaaactaattcgctgataatgaattcttaagtaaaaggggaattccacagaaatatatatggctcttttatatttaataaaagagcctgaaaaacagttgtgttctgtaaaactgaattactttctatccggttccactggttcgcagtgttttacctttatattaaaatatacataaatgattgatgaatttttttcttttagacactgctgctgaatccatggagagaaaaaggataaatttccagaactatggtccctgtgctccagttcaccaggcgggcgcggcggagacggagaccaaggaacacggctggggcgatgcggcgctacccgcacgtggtggcgctgtgtctggcctgcggcttctgctcgctcctttacgccttcagccagctccccatgtccctggaggaagcagcaggcggtggtggcgggaagcagcaggcctcagtggcttcctggctggcaggaggcggatgcggtgccgtgagaggcgcgggcagcgctggtcctgctgtgcatcctggtgggtgggacaggtgtcgtctgaaaatacagcctgttgagaaaatgcatctagctgtagttgcctgtgatgaaagactggaagaaactatgaccacgttgaagtcagctatcatttttcaggatcaaagctcttcaattccaggtttttgctgaagatcagctacattatagctttaaaggaagacgtgacaggggtcatttctgcaaatatttaattatacaatataccccataacctttccaagtgagaatgcagcagcatggaaaaactctttaaaccatgtggtccgcagagattgttcttgccgttattcctgaaagaagttgactcccacactaatagccttttttacgaccagttgatcatatttgttctttactaaagaaatttaattccacataaattgctccagtggcctcagaacacaaggaacctcaaataagatggtatagtcgctttgctaggcaaccatactgtggaaaaactggagtaaaccctggaattatgttgatgaatatgactcgaatgagaaggaagtatttcaagaatgatatgacaaactgtgtgactacaatgaagagatatacttatgacatggcttaaagaatacaaactaaacattacataggcaatcaagatttacatgggcaatcaagatttgttggatatcatgttttttcataatccagaaagtctttttgcctttccgtgtcaatggaattatcatccagatcattgtctatatggaagcagttgccaagaagcagaagaaggaatcttgattcttcagggaacagaggtgtttaccatgatgataagcaaccagcatttagagctgtttatgaagcactgagaaattgttcttttaagatgacaacattcattccctaataaaacctttagaactggaactacaaaaaacagtgcatacataccgtggaaaaatttacaaaatatttgtcaaacaactagcaaaaaccataagagatcattatgccagatgaccaaaggaaaggtgattcttggtgcctgctacatcaaaggatgaaaacagcaaagcattggaggataagtgtgaaggaatcatcttgggtgaagcattaatgaaggaattattcatctctggaatattttttttcccaaagaggttaaatgagcagtattttcaggtaatgaagaataaattaaaatcttgggctccaacaaagaaacatttttggcctctgatgttttgtaatgttacttactaccattccagtattggtgaaaatattattgaatggttttagcctgcaaacttctgttgactcatactctcaagtaagagtgctggggctgtgaagatgaagaaaatgtatctcaagcacagtgcaaactttaactttcttaaagtaaggctctagacaaggctgtgagtagagcgataattttatgtcagcactgacctcgctttaaatgtgtgaaaaaaaaagtttgtttacaggagaagaaacagttctgtttctaaagaaatgtaacagatgtaaccatggatgatctatgtctgcctttatacatttcatgtctgttttaaaatatttttatgacaatcatgtttaaaattgtttttagattataagtaagctgcatgttaaaaattgaactgtataagaaagaggaaatatagtgaaaactttggggttttaatctgtgcatgtgtgagagagagtgagaaatgtagtgttttcattgtgtatgcattaaactgtcttgccaaaactcagatctaagattgttaagtagatatttggggaattttttttatcactttaaatgaaaaaatttcagctttactgggtattctggaagcaaaatatattatgctgatgataaagtgagaaccttaagggtatactcatttgatggtggaaaatgtgatggaccaaaattcagaagctatacacatcctgtgagtagtaattttagttacgatggagtagaaaaatgtggtgcatttaaacttttcttctacctcataatggctttgcaagatacttgtaaagaagcaaatgtctagagccttactttaagaaagttaacaatgaactcaaacaaatttacaagaaaaaaacaaacaaccccatcaaaaagtgggcaaaggatatgaacagacacttctcaaaagaagacatttatgcagacaaaagacacatgaaaaaatgctcatcatcactggccatcacagaaacgcaaatcaaaaccacaatgagataccatctcacaccagttagaatggcaatcattaaaaagtcaggaaacaacaggtgcaggagaggatgtggagaaataggaacacttttacactgttggtgggactgtaaactagttcaaccattgtggaagtcagtgtggcgattcctcagggatctagaactagaaataccatttgacccagccatcccattactgggtatatacccaagggactataaatcatgctgttataaagacacatgcacacgtatgtttattgtgacactattcacagtagcaaagacttggaaccaacccaaatgtccaacaatgatagactggattaagaaaatgtggcccatatacaccatggaataccatgcagccataaaaaatgataagttcatgtcctttgtagggacatggatgaaattggaaatcatcattctcagtaaactatcacaaggacaaaaaaccaaacaccgcatgttctcactcacagatgggaattgaacaatgagaacacatggacacaggaaggggaacatcacactctggggactgttgtggggtggggggagcagggagggatagcattaggagatatacctaatgctaaatgacgagttaatgggtgcagcacaccagcatggcacatgtatacatatgtaactaacctgcacattgtgcacatgtaccctaaaacttaaagtataatttaaaaaaaaaagaatgttaaacaacttttgtgaatgatttggattaagattgttacatccagctatagaaaatgtggttttaattgggttgatgtgagtgagtatcttccttttttgaatatcacttaaaagttaattttttagttcttgaagatgagaaaatattacttatctaatataactatgttaatagttatctaatttgtagttatctaatataactgtaaattctgaatacttagtatgggctgtgctggggcagatatcttattttaccaactgctatatggttatatcttctttttcttcctgatattttaatgctcaagtagaaaatggaaaatcatgaagggaaaatatcacctgcgaaaatcgttgcagttagctttgtgaagacaccgtggcctctgtggagacatgggatatgcagaaagagatggctagtacagttgttctgtcttctgcagttcagtcagggacacatcgagagaggaaagtttaagcaaggtacattagaagttgataagcagcccagcattcttagaacagttgggtttagagaatacaagttgtagttccttggcagaatgccatggtggatatgagaaactgtgaactgcattgaaattgagcttactgagcagaaaacgagaatattaaaaatttgaagttcagagtatatgcattcgattatttctaatggtccccaaatatgatcattgcctgcctggctatataagactcctgttgggagcttcagaatagattcttgagcttagccctttggagactctggtatgctgtgtctaggatggagtctgcaaaaaaaaaatttaaagaagagacttaaaaattatacaaaactagaatagtgctttggtactatcagagtactttggaggctattcccacttagattcttcatatagaagatgtggatagagagacatgcagataaatcagtcaatgccaactgttgggggaaacgtccatagtctgcagattcccacagagaacatagtacttccactcctctcccatgagggaaaataaaggagaaaagctttcagcctctcaccataaactcattcaatcctccccttgggaagagaaatgacttacctgaggaatgtgcttggaagtagttgtgctggtgaaactcagcctctgtgggtttctctctctttcagagtcagctctcttcaggatgcacatttatttctccctttggaggaggcctcagtccagctcagccaaggactgaaaggcacatctggctaattcaggactggggtattgggaagtccccttggccccagatctatgacatgttctcgagtcctgagacctgctgactctggtgcctcatttcccagttgggtcatatcttggggttatttgtgttccccagctctaacaggaaggttcccaagcactcatttcttcttaaccaatttctgaaggtaagatgttggttgaagagagctcttttcttgctgctaccattaattgggtgtttattttgtgtcagacactgttgagtattttacatttcttagctggttttatatttacagcaactttatatgacagacattgttcctccatttttcaggctagaaatctgaaggggtgggttgcccctccacacctgtgggtgtttctcgttaggtggaatgagagacttggaaaagaaaaagacacagagacaaagtatagagaaagaaataagggggcccaggggaccagcgttcagcatgcggaggatcctgccagcctctgagttctcttagtatttattgatcattcttgggtgtttctcagagagagggttgtggcagggtcacaggataatagtggagagaaggtcagcagataaacacgtgaacaaaggtctctgcatcatagccaaggtaaagaattaagtgctgtgctttagatatgcatacacataaacatctcaatgccttacagagcagtattgttgcccgtatgtcctacctccagccctaaggcagttttcccctatctcagtagatggaacatacaatcaggttttataccgagacattccattgcccagggatgggcaggagacagatgccttcctcttgtctcaactgcaaagaggcattccttcctcttttgctaatcctcctcagcacagaccctttatgggtgtcgagctgggggacggtcagggcctttccctccccacaaggccatatttcagactatcacacggggagaaaccttggacaatatctggctttcctaggcagaggtccctgcagccttccgcagtgtttgtgtccctgggtacttgagattagggagtggtgatgactcttaacgagcatgctgccttcaagcatctgtttaacaaagcccatcttgcacagcccttaatccatttaaccctgagtggacacagcacatgtttcagagagcacggggttgggggtagggtgtcagattaacagcatctcaaggcagaagaatttttcttagtacagaacaaaatggagtctcctatgtctacttctttctacacagacacagtaacaatctgacctctctttcttttccccacagaaatctgaggcccagtgtcccacaatggccatgtggtgacactaggctttgagcacagatggttgacttccaaactctatgttcctaaccattatgccagtctgtgttgtgtcagcaccaaacatactttcattcatatgtattttttaactgatcatgttcttgtgtgatttctttcagaaaggcttttacatcaaatattgataatgatactaataatgaacacatgttgagcacttaccatgtctcaagcactgctctagagctttccatgaaaaaacccctctaatcttcagaacaatcctgtgaggtaggtgctactattactctgttttcacaagtaaagaaactaagcacagcagatccatagtcatgctgtaggatgctgtgtagaatggctcccgggacactgggaaagctcttctgcaccccagcatcctctttactggttcattaatgtctgatattcctgcatgagaaaacacagcatagagagaaagcttaatatgtctatacacacactgagagatgaggcattgacataacatctcattataggtattagaaatgcagtctcaagagcaggttgttgtggggtgacaggcagggtattctaggggaaagaataccccaagaaaggcagcattacaaaggaagaggagaaagaaagatgtaaatgaggagacactgattttcttccactgcaatttttcccaaggctggccccttttctattacattgttacccagtaactcatactttccctagagctcttgcaagcaagaactattgagaaagtagcccatgtgaaagtatatttcctgctatttatctgcttccagaactggctgaagtttactttttggtactccagagaactagctgcttcttgccttcttccagtgtggtctatttaacctcctgtcatgtgggaaattatattcaaaatttctgtgatcctctgtccatagtaagttacgcatgtagtgacaaatgcatgccacaaggtcttgagattgtatctgcaatgtgttgctgctggctgttgatcaagataggctggaagagaaacatttatcaaataattcttcttgcatttttcccaagacgttgtagcgtatttaaacttgggaagtgaagtttgtagcattcattatgactgaaaatttagttcacacaatcatgatgctctattaggtgttaccattaaacaatattaaaatacacacaatgtggctggtctttcgtaagctacatggcatgtttacttctttgcctggtttcttaattgcatttcttcttctttctgaatacccatgtcactgtcacccacaatattttctgttttgagtacgtggtttacattttactttgcccagtgatagaatatgatggggacatcttatctgagtgtttcatagtatgctgtagtttgaattcttggccgttggtttcccagagtcccagctcctgccactgcattctgcctttgcaaatggagaataatggctctaaaaaaaattcacataagaatctcatgatagtggagaaggaggaccatggaaatgctaaagcctcccactcagcttctgtaaatcatgcagaggatcaggaaaatgattgaaagtaacgtatcccaaacaaagaagccagctgtataattaaagacctgtgtctggctgttaagaaaagaaaaaaaaaaaacaatggaaagaataaccttgctattcatcttgttcaaaaaactggagcagattgagtcatctagacccagtttcagatgaaatgttaaataccgataggggcatattcaagatctttaggattttttggggggaggaagggggaacataaaaaagcaataataaagataaatttgaatgcaggaaaaatacacataatccatgaatcaaacacctgtttttgcatgtttatcacctttgtccctatgtagatctatgttttctttcatagttgcagtcatagaatatattctattctctaagcttttatcctttaacgttataggagaacattgttccatgttaccacatagccaagtgtttcaaaacttgtttaataaattctgtgttgttgttttcacagggagaaacatacgcatgtatattacttgttttttttttctgttgaaatatactcttggaataatttttttcagtgaggtttttggttccaaaaagtataaacattttggtgatctttagtaagttgtattgctttccaaagaagtgatagaaattatacttgccaccccaacagtgaaagagtagtcatttaatttcagtgtaacaggggatgctactgttgctattatattttctattataatgaaaagatttcaaccaagctggattgtccttcaggaaccgctgctaaatcaacaccttgatatctttgttctgggagaaaaatgagctaaggaggaagaccgtctaaaaaaagccattagacaatttgtgctcactggagtggtctctactgggcaaaaggcttttagaatggcttgtggatcttctggcaagtggcaaaccatacaagtgctacatcaggcctggaagacaggtgcagccctgtcggggtcaaagaggaacaccagtggcagaagagctaagagtgaatgaaaattgaattatctctacttctaggacttgtctattgagaaacagcagctacccactccagcttgggcaacagaaagcctgtcttggaaaaattgcaaatcaaaaacagaaccccaacagcatccaagtctgctgataagcacactctgaaaatgcatgaccaagatcagcagcaacttcaatgctgcttttctcaaacagtagcactctaaaaggatgcacacagcttactgataatgaacacaaaaattaccaagagattggtggagtaaatctcttaaatttcttttttttacttcttctccaaattttgatgtgacatagctaatttgaatatatatctatttctagattatacagatagccttagggccccacaaggcattttgggaagttgaaataacagcagtttctaccttacaggaacctctaaaaattattatcataatcatgacttattttattgaatccatgaggcctatgaggttttaagaaactcaggttgggccgggtatggtggctcacacctgtaatcccagtcctttgggaagctgaggtgggcggaacacttgaggtcaggaattcaagatcagcctggccaacatggtgaaactctgtctctacaacaaatacaaaaattagccaggcgtggtggtgggcccctgtaatcctatctactcaggaggctgaggcaggagaatcacttgaacctgtgaggtggaggttgcagtgagccgagattgcaccagcgtgcatgatggcctgggcaacagacagagagaaaaaaaaaagaaactcaagttgtacccactagttgcagagtgattttatttgtatttatttattttgagatggagtcttgctctgtcacccaggctggagtggagtggcaggatcttggctcactgcaacctctgcctcccaggttcaagcgattctcctgcctcagcctcctgagtacctgggattacaggcacccaccaccatgcccagctaattttttgtgtttttagtagagacggggtttcatcatgttggccaggctggtctcaaattcttgacctcaggtgatccactcgcctcagcctcctaaagtgctgggattacaggcgtgagccaccatgcccagcagtgattttatatttaaatgtgtgctttataggttgcctcattttctggtcatagtgtctccatgaaggaagtagtttattgctgtttttcaataggaaagcagcaatacaggaggacaaatgacttaccttttgtcattcagtctgtaagtgggaattgagagcaggatctcaggtcctctgaccttcagccctgtgttctctctttcacttagctttccagtttctttatgccaagtaatggaagtgatttgaaagctgcattctcagcctattggaaagtggttcaccagaggtgtttcttcaccactctcattctttaatgtcacctgacaccaaagacctcatgatgggaaatactgaatgtggatttggccagtctgctgacatcatcctgtcatgcatcccaaaattacccaagctcatccctctgatcagaagtatttgtgaggtggaaggtggggccttaatggataaccctactaccccccatgcactgaggtatggttggccaatgatcctcattgacatttggggattgtgtgtaggattatgagcatccattgtgagtgctgagacctgagacaacgcaccaagtcaggcagaagtgcggttcatcagcatcttgacaacatagtctattctcacgtgttcaaggcctgagccaccactgccatcaagctgactccaagtggctgcgttttcagcaagaggggaatagcagtcacctatctgcttcttgactgtgttctgctgggcttcctgataaaagatgtttattcagagagaaagagacaggaaagtgaggtggtacacaacctgctatccccagactttgcacaggtttcagagttaagatcttctttgaaggctctgaaacctgggacagtccttaccatgactgaaacctggagaggagatgtggacagaggatcatttttgtgttgagtcactaggtgaccctcttctcttctttataacaatgtgtgttgtgcctgggcccttgttaggctgtctttgtgttatctctggctgtgactagaacaacatgtgttctcctcccactttcagcctggaagatccaacgtctgagccctgagtgacaaatcagcttcgtaatgggaagctgacaccatcctatcttcaaaggctataactgggcagttgcagagagccctggtctcagaagcattgtgcacatggtttacaatgatctgctgttgcatcttgaaatgcttaatttttgaacaagaagccttgtactttcatttttcactgggtcctacaaactatgtagctcatcctgccaacatcattggcatccctgagtatgagagctcagaagaaacttagaggctgttgtctgattcagcccttgcagcttacaaaaagaaatgtgggagcaggcactgcatgactagtctgaggttactcaggaagtcagaggcagagctgcagtcaaggtcacctctctttactgctagctgtgtgctctttctactgcaccctcagcacaaaacatctcccaatccaggaacaaggtctacctcataggtgggcacagcagcgtgatcactctctcagtcatctgtactcctcctttgctttgaccaaagagacaggaagggaccttttgccccacataaaacacttctcaaaggcttggcaacaatagataatagagagcatttgcctaagaccaatgttttgaccatgatgtcaaaacaatattttgtttcagcaaagaaaagctatgtcacaagtggattgttattactaataatcagagtagtggtacttgcgaataacttggtttcatactcacacttggacaactatgcacactgagtataactgaccttatgagaacatcattgtcactaagattatgatgtgtttctcgtgtgggaactgtacataatattgtgtgtacccttgggaggatgtcctgcctgtgatgttgtctctcagagaagaagagtggttgagaactgaggatatattcaacatttactcccagatttttcaagatttctgttaagccagatcagaagaaagccatctatttggattgcatcactctaactccttaagttgaattgtctacacagaattataatttcacagtatgtccagattacttaccgagaaccaatttgagacaccaacaggactagtaaaacatctttgcactgtggggcgcattgctatcaaagaccttgtacattatgtcattcaagaacctttatattaagattcttatgaaaaatccttcccaaagtttaaccctatgatactggggtttttttctccaggtaacatagtggaaaattgggaactgtttaactcaatgcattgatttcattgattgttttggttgccaagaagtacggatgctcagaataggttttcttgttttcaactgctaattcctttatttaaattgtaataaatgtttccctttgtttctttgctttttctttttaagaaattgaatgtatttaataataaattataaattatcaatagatcaattagcatagaatagtttggaataatgcttaaagatctcccattgaaaaagaccccagtaccttagggttcacagctgagtgttaactgaactttaacaaattctgattttatttaaaacaatcaaagcctagaaaaaaaactcctgcacatcatatggggcacataataaccataaaaagaaaagaaagaaacaggggtggctttcttcaattaattttgtagtgtaatatcaaagcttaatgcttaatgtatttcatctaatgtaggatgtcaatgtttagaaatcagacattatttcatgtaccattatagacatactgccaaataactgtgacttccttaacaaaagcaaaaaaaggaattgtaaagatattaaaacatgtaaagaagaatataagcactatactcaattaacatgttaatattttattgtattggttttcagtaattattttcaataacataaagcattattaactaatattccacccctaccaccccaatctcattctccttctaggtccccagggccaattgctaaaatgaatttgttgtatattttaaagtcaattttttatacttttgcacataaatatgtgcattcataaaaagtatttttgtgctgagaaggtagaataagcccttcaaagctgttgatgttcagattccagttagcaaaagtcttacacatatggcattaaatattttcagtataaatatgcacattccacaagttcagcagttctgtaatatacatccagagtctgccctgagggttgcttacaatcttagcataaactctcactcaccccttttagagaataaaacttacacccatgtaaggaccagtccaggtacaagggtgtcctctaagaacactcattcatatattcaacacatctttattgagcaccttttcatgttagggaggtgacctgtgttctccctacacaacaggagaaagtgtggtggcactggcaggaaagtgcagtggaaaggaggagctgactttggcaggaaaaagaacgatattactttgaatttatcaactctgatgtggcatcctgataaaaagtgccatatccaaaccacattgtagattctcaaaagacagcatgaaagttgaataaaaactatgtgccccaaatagaaaatggtatagaaaggcctgaggctggggtatggaggcacatggtgtgcagagaacaagggaagagaagagtgaacaactgctcggggtggggttgcattgatggtgagagatgggtgtaacatgcatttatgaggacagacatgatcaggtttaaagaaaaagaatttttttttccagcactcccactatggggcatttatctacaggaaaggaaatcagcatatttaggagataccagcaccctcatgtttatagcagcactattcacggtagccaagattagaatcaacctaaatgtccaaaaacagataaatagatttaaaatgtagtatatatttacaatggagtactatttagccataaaaataatgaaatcctgttcttggctgaaacatgggtaagcctggaagactatgttaagtgaaataagctaggtacagaattgtaaatcttgcacgttctcactcatatgtgggagctaaaaaaaaacaaactgagctcatggaagtggagagtagaactgtggttattacaggctggggcaagcaacagggaggagacgacagggagaggttggttaacaaatacgaacttacagctagataggaggaatgagttctagtgtctacagcactgtagggtaaatatggttagcagtaatttattggatattttaaaaaagctaagaaagagtattttgaatgtttacaactcaaagaaatgataagtgtttgatgtgatggatatgttagttaccctgatttgatcattacatatatagaaatacatatattgtatacatatattgaaatgtcactctgtatcccataaatatgtacaattacatttcaactaaaaatgaaaaaagcagtaagactgaaatgataggcttagtatcaacttatagatgagtcttgatttagggaaaagagataggtagaggagagagatttatgtctgagtgtgaagagaaatttttattggtttttggtgaatactgcccagtgaatttcctagtttagaagaatcacaaggagctgccaatgtagtgtgggcaagtagctggagtgacatcagaggtcagctctgtgactccagcaccagattattcttttatcagtacctgaagctcacagtcagatgcccatggcagtagcatcaacatattgacgccaccaccatggctccatcacccttcaaaaccatgatagaaagaccaagacatggatgtccagctaatggttctcagatacgaagggcaagagacctggagtgatatccaaaacaagcaagaataagaccacattgcaagttgttttcatccattggaaagcctaagaagggaaccaaggtggctctccaaaagctttgtaacttcaaacacttcccaggatccccactgccatcttaatgttattattcaagttctttttcctgaactagctgagtttataagccatttttgaaggtaactgtagctatagaaaaccacagttataagaaaatgcaatctgttgatctcttcatggtagagtctttatatcatttacacttcacttctctgtgggtggaaaagcttttttcatggtttatttagtgggaagtcattttgatcagcaagatgagtaatactttacagctgtttgcaattactgcctctgctctgccaggagttttaactattacacaaactgaaataccaaataagttgatgcaagttgggaagagaaatacatatttcataggcccattcatttcaccagaaattatccatcactttttctttcaattctatctttctaaattcaaagttacatctcaaggtaattttgaattacctaattccaaaggatttttatcaatgaagggaagtgcacctgctaacaccaaatttcctattgttgccattggaagggcaccattgcctaaattccacacaggtctgaagccagtttggcgaggagaaagaacacaggccttgatcggcatatttgtctctttaaaacacccattcttcatgattttaaggaaaagatcatgctcattattttcttccctcccaatctttctaacatgggcccacataaaacgtgtccccctctgccaacatcccttcacacacacacacacacacacacacacacacacacacacacacacacacactctctctctctctctctctctatctctctctctctttctctctctctctctccctctctccccctctctccatctctgtctctcagatgaggaacaagctcagggggaggtcttgggattagttctgattggttctgattgggtcacatgcccatcactgaaccagtggaatgctgcatgctaattggctagttctgggtcaaatgcccacctctgaggacagaggaagaatcaacttgtttaattgatccacatggatgggctgagctcggcagaacttccagcaaaacttgagtgctgtttttagaaaaaataaatggaatatatttgaaatgaagaaaaacattatatctccactcaggcatttctctttcctgggcaattgactggagggtgcatggggtaaactcatccaggctgcaatgatttattgaaaaatgccattcttattcaaatggacaattcataaaacttgactagatccaaaagcctggccgggcacggtggctcacgcctgtaatcccagctctcagggaggcaagaggcgggaggacagcttgagcccaggagttcgagacctgcctgggcaatatagcgagacctcgttctccagaaaaaggaaaaaaaaaaaaaaaaaaaggacaaaaaaaaaagcgtaactccccttaaagcaacaactcccctgcccccacttttaaacactccaatgaaagggtaatgcaatgtattaatacatattaataattaacaccctggccgggtgcggtggctcatgccagtaatcccagcactttgggaggccaaggcgggaggatcacaaggtcaggagatcgagaccatcctggctaacatggtgaaaccccgtctctactaaaaatacaaaaaattagccgggcatggtggcaggcgcctgtagtcctagctactcgggaggctgaggcaggagaatggcgtgaacctgggagtcggagcttgtagtgagccgagatcgcgccactgcactccagcctgggcgacagagccagactctgtctcaaaaaaaaaaataataataataataattaacacctactcttagggataccctgctcttcacttagcagaagatgttagataataggcgagcaattgatcaaaaggtcagaggatcacaggcatttctgtgatgtagcaagcactgagaatagctgtgaatatcccaggaattttctgtaggtatcaataaagcaagattttggttcctgaacactgaccggagttctagtttggcaaactttctattttttattcatatttagcttccagtattttgaaacagaggttaattgaaagagaagacccaaaggataaggaagggaaacatttttttttccacatactttgtgatatgcatgtaatacagatgtaggggtgaaaagaatgctgataaatgtaacattttattaactaatgaagcctaaggaagaacatgtaaagagatcaggatctgatttcagattttacttgctcctacatagatatctcagggatattcaaataaattaagactcaaacacagcccacaagaacatcggcagatgacatgccaggcactgtgcccagagccttctcaagcaggagcttcttgaatcctcccaaggattctggaagaagggtgatattctccccttccacagatgaggaaactgaagtcagaaagatcaagatcacaaaaatactcaatgttggatctggtaaatgaatgaaagtcttctaacaccaactctaccctctcttttcaggacaaaatgtaccttcagtttagctggttcatccaactaccatagatagaattttgttttgtttttcagtttctaaaagacacaaccatggctttacttaattggaataaaaattctgagaactaaaccttccctttcccaggaaggcagtctgcaaaggcacagagactgcagaatccggaagatgacaacttctgagaatcagggttaatgaccagggctcgtcattcagaattgtgttttgacttctctgcagtgctccaggagaacaaattagaggttgagctaggagggactaataaaccagtgggctttgagtcacaaggacctagatttgaagattggcataaataattataactggaataactttggataatttacccaacctcattgaccctcatttgtgaaataaaaataataaaaataatacctaccacattggattattgtgagaattaaccatggtaatacatataaagcatttagcccaagcctggcccatggtaagtacatcataagtgatagagattttattagtattactaatagtgttaagattagtagtgtttcttaagattgattagaagtaaacctcttttgtgggaggagggaaatgtattaatttgttttatagaaacatgatatgctaagttagtgaatttaggtgaggcagtgggtgcgacagacaaagcaatgagtgggagacacgagtgtgtttgccattttgggacctcaagagtgaggtgagccaagggcaaagctgagccaagggcaaagctgatccaaaaggaagctgtgccagatacatggagtggtggaggtagtgaaactccttatgtcagtgaaattacagcaaagaatgccttttgtaaatgcagcaaacaaaaactaagggtggaaaaacacatggtttttaatgtacaatttagaggatggttaggtccaatttaggggaggatgaaaagaagaatttagttcatgcagcaggtaaagaatagaattatggaataatagccttgaattatttagatcaatttactgagcccataatctcaggaatttctgacattgtagtaaaagtaaatgaggtgtctgtagatccatatggcttaacctgtgtggccactgcttgtgatcacctctgtatgaaagaaccgtgatttgaggtggctgtaatgcattaaccacgccaattgcttcccgctccttgttgtcaccaaagtgggccacactcacctagaaattagggcaggcagaagggggagcccctaaccatttgcattagtttctgggctcccttgtcagttttgacccctgcaatagtaatcttttggcaaaggaacactcaaccctgccattgccgggggtaaggatcccaagggtttggggagaagttttgctgtcttatctgagaatggagtcatgttgcttttggatcacagtgtctcagggagatagggagctccaagtcctgagaaggaggaatggtacctggtaccttgaatatgaggcacacgctaaaaggtaaggaagagaaagaaagagagagagagagagagagagagaagaaagaagaaataaagaaaggtgtttggctttagacctgattatttcagctgtagaaacactaatttcgctgactggtgacggtgggggtgggggaatgtagctgtttcctgataatgtcttctgtgctgaaagtgccctggatagcaaggaggggcactgggcaaggacaaaccaccaggaagagggcagccctccagtgcaagagggtgaagcagcctgttcttgcgtagtgtggacagaactgaaggcatctttgtcatggactcgagtgccccctgtggatgctgagggaccctggagccccgtgggattttacttaacggggcttcctgccctgctgcaaacacatcgttccatagttctttcttgtgactgcaggagactctgctccagcatcaaaaagagaagcaaaacatcatggatccaggccagggtttcccactaattagccatgccccctccacaaattacttggttttctaggcctcagtttcctcatctagtaaatgaaagttaaataagattatttcatatatcaactaaatcccaaacatgatttttcaatatcttttgtctactgtcttcccctatcaattctttccataaaaagcccctgctgagaggtctgagaccttgaatcccaaatgcctagtgtggtgactggtgcacagtaggtgctcaagaaatacttattgaatgaatgtttcttggaaagtctctgttgaatggatgctgcttctattatctcttcccagagaaaagaggcaaaaatctatggcaacagaagaggggaaaatcattctaatagttgatggcacataatacattaaagcaatgctcactcaccatacattaagtctttttcatatggcttttaaacagcttttctcattagccacatgaaatacagtaatcctttagctctccttgtcagattatcagctatttcaagtaagtgttaacatttctgtcactggcaaaaatgaattatgttttccttcctaagcttgcatcaacatgcccaacaagtgggctgcatgctactctctaatgggatggcgtgagatgccactgcttggtgattatgaagcagctcgacatctggaggtgggggcatgtcagcctgagcagggccaggcaacctttgcaggatgagtgaatgaacgaattgggatatcatcctgggtgaataacagaactcctataactgctctggctttggtatataaatagcctgcacagaaaattctggatgttgttattccttgtgaatttctgtgtcagcgttaatgacaatacagaggataccagctactttatgctcaaacacccattttttagaaatctggaaaatctgtccaccaggaaaattcagttgggtgattcagagttcttattttgtgaaccagttgatcatggtgtatcagagaaagatcctatttaagagacaaactgcaatagaaattcaaatttcttaacaggtgaatgtgatcaggccctggttgcttttccacctcctcttggctgtgcagtgtgtcacgctgctgctgcaccacatcacgtcttttcactgcccttcccatgatgggaacaactacccattttgtctacctggagaaatctcacccatcccctagaatgatgcttttctatattccccagcattttgtaactacctctataggcacttctaaatctcattctatttatatgtatataatcttgtctattccattgaatggtgaatttcttgagatcagaaactatattttattttgaatttcaaatgggctcttgtatatatcagaagccaaataaatgattgttgagattaataactgctacttagagtatttcagttattcacactgcaacactggaaagtaaatattattgctttcattttaaagatagaatacaggatcacagatttttagataacttgcccaaagtaataaactagcgatagaatatcttagattgaaaatcaactgtgcaatccccattttaaattaaatatttaatttaacacatttaacatgtgtgcagaatcactaaaacttcacaaattgtatttgttagttcatggatacatatgtattttgttctaaccagaggagtggagacctagcactgaattatctccaatgttttgtcttttcacttcttgatatcagcacatcctatcagtgctttctgtctttggcttacagatgattaaggaagggctgaaaggaaaatgggttgtctcatctttttctgtccttccatatcattatttctgtgtaagtggctggctaatacagggaagtaagaaaggatcgggaaaattcctgtggtgagagaattcacttttgaggaaatgaagaccttaagggggaaaatagaatgaagacaaaggtcagaaatatgtgtctaaaagctcctacaaatacctttccattaaggaaatttaactgcaaaaataaacaccaaatataggcaatcgatgacttttctcacactaaattagtagtaatgcatgtacatttatttcccttgccgtgtttagcttaattgaaacttttcaggatctctcctgaaaactggtggctgccaatttgttttactccaatatgcatgctaataagcatgtgtaaaggtagagatcaatattcattaaaggtaacgtgcatgctaacaagaatttttatgtgtctttctcatcctccaaccaaatgtttcatgcttttctgattttatggctggagctcctcttctttgatgcccctccagtctcttcagtggagtcagaagcagagacttggctgcctgagatggaaaaggcattggagaccctcagttgttctctgctgaggaagtatttagtgctcttctctcccagaacgctattgggattagattgcttaggtctgggagtgttaacttcttgcttaggctcctgttgcctggccctccttaacactttgtggttccctcctcagagaaaggcacagttctaaggctggaacgatttccctttgtcacgcatgtccatgtgaagagaccaccaaacaggctttgtgtgagcaacaaggctgtttatttcacctgggtgcaggcaggctgagtccaaaaaaggagtcagcaaagggtggtgggatcatcattagttcttataggttttgggatcagttaaggtggggcagaaacaaatcacaatggtggaatgtcatcagttaaggctattttcacttcttttgtggctcttcagttgcttcaggccatctggatgtatagtgcaagtcacaggggatatgatggcttagcttgggctcagaggcctgacagtatgtaatctgcatttcccaaaagactgtcaccaatgagttgaaataattgattgactgtcacctacattctacttgttattgccctctctcaccaccaataaaagacctaccagcatttctattcaaacaagccattgttcatgcaaaatggacttaaggctgtccactccagctgcgctcaccccactggcccaacaaagcctgtgccacagctgggatcccttctctgcaaacatgaggaaacttgggttttgtgaattggtaagttgctcaagggtgcacacttcgaagagacagacctggatcatcaatttatacttctgcctctaagggcactaccttccttctgggttcgagctgatcaacttctcatctcaatacaaaatcaacacaacactttatgccacttgtttatattacttcatattacttcttactttcacggtcacacagattcgtttcctttggcaaacaaactaaaattgtggcaattaagtgagaaggttagggaagaaggttaggacaggaggggtgtggtctgaaaggcctcacaagaccaaagggcagtgactcctaaggacagggagctcagggattcattgtacaggcccgaggtgggagcggtgcgaagagcaggcctcatggtttgtcagggcggagcatagtttagtcaacattatgtactcaaggctagtaaatacaccacagacttcattagctaagcagcaatccatacagatattaaccaattgcccactctgtgccaagcacatatgccatcgtttggtgattttcacttattcatacaatcttctcaacaagtctgtaaggtcttttgggacagagaaagtctcctgcatcttgtgctctcttaccactttttgcttaatagattttgttgtttcaaattctaaaaaggaaggaaattaaacaattcttaaccaaatgatcattctcaaacagggtcagtgccctctcttgggatgcaaatcctatgtatcttattccaatgaataactctatagttagtcattgatatggcaagttcaggcttttgctcttcctctttgaacatcaatgggtgcgttttatttctctctctctttttattattattattatttttgcagaattaaggaagccaaaccctcagcctcatgtagaaagagctcatttattgcaactaaaatatctcttcttggaaggccatgacctcagaaaggtgagcactttagtttttctaaagtagtgaatatttcatctctcttactttggacaagtattgaaccacatattattcctgcttgatcccctggtctgttcactcctggttccttgtccctctctcattttcaagtgagagcttcaaattgcacaggaattccaactgcaccattccttttactcttgacatttctatgagcttcaagtacccaatgagaattctgtttctggtgtttaccaagtgaattggcatggacagaaggttgcatgccccacaccatttgcaggaactgtttcttatgatcagtaattttaaagcaatgcacctcctcgggctcttaactatgtcatcccaggagctgcttctccttttttcccatctccttcatcatacaggtgtcagacatgcctcaggcctactgggcatctgctgtttatcagtgggcccctctctgcccccagccccctgggaaatccctctgaggagtgaattattggaaacacaaggcaaggccacagacttactgggggagacaaatatataaaaagacaattatggcaggtgtgaataatgcaataataatgttgtttaccaataggagttcagaggagggtcccttagcacagcctataatggagtgtggaaaggagaaaccaaaaattctctagaaagaaatggcatcaaaattgaggcttaaagatccatctttaagctatctttgttgctatctttttcaaaaggaagagattggtagaaaagagaaaaaactttatttctgttgtccttccactagtatttattattagcccaccctggaaaatctgtgtctactgcttcttcagaattcattacacctggtgagtcccatgggccaaggcccccgtataatttctatgcctttgcttaattaagacactgtgatagactgggcagacatttcctggcaatttatgatcagctggaggagcttaagtcttaaagcaaagctgtgaaaatatgcagttatgtttatataaaaagtagtgaaattataacttttcatgtcttagctaaaagttgaaaaggcacattgctgtggttgacaagctgcatttatactttttgttcttttcctattcattaaaagccattcacaaataaacaggaagagagagacacacactctgagtttgacacttgctcttttttattaggtatttggaatccaggtgaatgtgaagaacttccctaagactcattgctggctaacactgggattagttactcaaagagctttgtagtgtgaccatcattaggacttttacagatgtctttatttaatcacataggtttagcagagttcagccaatagactgtggaatggacagaatgagcccaatgcttgtctgacaaaatatgttgaatttgtcagttctaagtgtaacacttggatccttcacagctatcaccatgtagtacagtgttgttcacctatccaagttcatagaagattccaggctctgcaccaagtattttccatctataacagggataaagttttagatatattttctaagttttcttacggttgggctgatttctgtccttgcaccctgctagggtctgactgtttctgccttctcagaatttgtatgttgaaattttaactcctatggtgatggtatcagagggtgaagacttagggaggtgattaggtcatgggggcagatccacatgaatgggattagtgcccttatgaggtactcaaggaaaagccctcgcctcttccaccaatgtgaggacacagtgagaaagcaccgtctatgaaccagaaaacaggcctcagcagacatggaatttgctggtgccttcatcttagacttcccagacttgagaaaggtgagaaatacatttctgttttttataagctacccagtctatggtagtttgttgtagtagccagaataaaccaagatacagccaatttcatcatttggactgaactttgagactgcaatcttagaggaatgagtagcaaatgatataggacagttgcattcagacaggaagggaaagtaacaggaaagcttaccccttaccatcctgtcagataatggaggcagaaaaaaaaaaagtagaacaaaaaggtcctattcccacataagaatcatacatcaaatgcaaaagtcttttaggaacatagaagtatggggcaatacactaatatcagaggagtagattattttccaaggcagagtctgcaggcccctagaacaatttgtgccttcagctggatgccagatccatcatggctccagagcaattctgtgggaagactgcagaatgggttcaggtggtgagtccactatggagccctggctctccattgtctgcacttgttatgacagggatttaagatttcccaaatgctccagaagggatgtggaagtgttgagaaaggagtgggcaactgtcagaagcttggggtcagagtggataggataaagtgggggtggacctgaatacacacaaatgcctgaaaccttggactccaggaagccaaagcttcactccaaaaggataggcagagctagacagagctcagcaatcctcagacaaggagaggtggaccagcctgtccacagctgggcatagagggcatctaaggattccacatgatctgaattttttttctccccactatcacaaggacacagtaaacccctcatacaacttggtgtcattccagggaagttcaggagtaggagacagaatctgaaagtctgaaaagcatctaaaacagattgtgttaactaaatgacatgtcaattactagatcaaaccaagatcgcacgactgcctccactatcaatgggagtgcaagtctacaaagactagtctgcatatagaacactaaaaggcccctgtttttcccacattttgactccaacatcagtacatttgcagccccactgcatgtgtgtcatctcattgaattcccagaacaaacctgcaagctaaatattgctattattccgatgaaaaaaacagatctacaaaggtcatatacatacattactcccagttttacagctagacatgtaatgtggaatcagttccacatatgaatatagatcagtctgaatctaaaagtcatggtgttcccatgatgactcatgagtttgcttcttgaatgtggaaacatacgatgctttgcatatgagggaagataaatgtaattgatgttgggtatgcaatgtaccttttttcttcagggactcttattgggacttgtaaggacacataaatgaaaaacagttaccttctagtaggtctaaatgtcagtgtagcataacaaggggatgggcgcagagcccctggaagcagcagggtttatgttagagttgaatgttccatctttggagctgtttgttggataaatgaagaaacacaaaagtagtaattgttcaggaggtagcaagtggcatgtggtgttggtttaattagaagaggtgaaagcagagctgaactattcaatgaaacagacatttatttagctcttaccttcaatgaaacagacatttatttagctcttaatatatatattacacaatgagagaatacagtgatgcctaaaccatggcagggtacaataggatataatattatacgagatggtgcactgaaagtggttttttttcttgttttaaaagcagcttctttcttgctctaatctttgtaaaactaaaagcaaaatctgcacctgtgtggaggagatatggtgcagagctctcagtaaggactgagccagttaataaatttgcagccccttttcaccttgtcaccatcttgctgtctatatggcagcatctgtggcctctatcacacattttgcttctcttactttctttatactcttatccagttcagctttgtttgtcatctcttatgcaacctacacaagtggaattctccttggactcttttgtctcaaacataaattgaaaaaccacaactttggcaatggcctgctgggtgcatttcagtatactatatctcaaccaactgagtcaaaaggggcaacttgtttttactgacaacctaaagacaaaggctcttcagggctatgaggaaagcttactttgaaagtgcagtaaaggggattttaaagaagaaaacaaatggcaatggaattttactgtttccaggaaacaaaaaattagaatttgtagactctaaactcagactgctggaaaaataattgggcctttatttgttccctttagaaaagagaaaaaaaaatctcttaattctcctgggagaattaattgcagatggagagtagattcttaggaatttctcacaagggaatcaatggcacatcctgcctgccctgtccccaagctagatcagctgcttcctggccaggagaccacaattatcacgtgacttcagtggcactggcagctcccctacataccagacccaaccaatagctcatgttgagaatggtgcctgagaggccccagtgaactggcagggggcatggggctttcttgctggagagaaacctgtccaatgactttgcagtgtgctcaaggtttacatggggttttctggagagatagtggtaggggtgaaaggcatttatctgagctttgccattgcctttttctagggccttatcctagctctcttgctcttcattcttaccatgacagaaaatacagagcaatcacagggactcttttcttgtataagcagagatatcatgcacagatctggtgactctgaaaatgcagtgggaggggctcaagagctctcatgcattcaaggtggaaaaagcccctcactactcactgtacatccatcctcaaactgacacacgttggctcttctctcatcctctagagctaaaacataagctgaaggtggccctacactccttcttctttataggaacacattgcccatgaactgagtcagatagccccataggaaaacataggtgagaaaagtttggggaaagaacttgaagtagcatgaactagagaacactctggaagagttaagaaaaggtgcactttttttcccctaggaggtccaaggactgtgaggaagattcaatagaactattcaatagctagttattcacaagatttatttctttccacactgtaggcagtgtttcccagtctcccttgcagttaggtggcatgcaactgcattcagcctgtgggaagtgggcagaagtgattactgacctcagccacttaccctcctgtgtacaattctttctcttcacttgctactgaatattgacactcagggagatcccagaagctccatgctgaaaatggtggatcctctttcagcctcaatctctgaaagactatgtagacccttctctcctcttctccttataagtagaagaaagaccagagcatgctctctctccccctgcccagcattgagagcacagaggaaagaagatgtgagggcatagtgagaaggaggccatctatgagctagatgttgtgggaagtcagggaccccgaatggagggaccagctgcagccaaggcagaagaacataaattgtgaagatttcatggacatttatcagttccccaaattaatacttttataatttcttacacctgtctttactgcaatctctgaacataaattgtgaagatttcatggacttttatcacttccccaatcaatactcttatagtttcttatgcctgtctttaatctcttaatccttttatctttgtaagctgagaatgtacatcacctcaggaccactattatataaactgattgtaaaattgcgtgtttgaacaataccaaatcagtggatttcatcacccgatttgtgcatgatatctctgcttatactgaaaaagaacagagtaacagattttcagggaacaagggaagacaaccataagatctgactgcctgcagggtcgggcagaatacagccatatttttcttcttgcagagatcctatagacagatgtgtgagtaggagaaatatcgctgaattctttttcgaaaggaatattaataattgataaccctggggaaggaatgcattcctgggggtaggtctgtagacggctgctctgggagtgtctgtcttatgtggttgaagtaaggactgaaatacaccctggtctcctgcagtacccttgggcttactaggattcaaaaattccagcctggtaaattctagtcagaccgattgtctgctctcgaaccctgtttcctgctaagatgtttatcaagacaatgcatgcacagtgggacatagaccttcatcagtaattctaattttgccttcaccttgtgatatgtattgccctttgaagcatgtgatccctgtgacctactctctgtttgtacaccccctccccttttaaaatctctaataaaaacttgctggttttgtggctcatggttgccatcacagtcctaccaatatgtgatgacacccccaggggcccagctgtaaaatttctctctttgtattctttctctttatttctcagaccagccgacacttagggaaaatagaaagaacctatgttgaaatattgggtgctggttcccccgatagcgaggaaaagagccctcactagacatcaaccctgacagcatcttaatcttgaatttctagcctccagaactgtgatttaaaaatgctttgttttttaagccaaacagtctatggtattttgttatggcagcctaagcagactaatacaaccatagatcccactctcaccctaatccttgttgcagattgaattttacattatgaaaaataaacatctctttttgttaagccactgagatgtcaggctttatctcttacaacagctggtgtttaatttctgatacaaagaccacatagagctaatcaagtgtctgatatcccttttctcaaaatgtacaggctggatttttataggcaaactctaccttaagtgcaaaacattccttagggtcaatacccaagcttattaccaaaaaaaaaaaaaaaaaaaaaaaaagctaactaatacttcattaacagatatttaaaaaataagaatacttatttaagccagctagtttttcaaacattttatgactcttagctcatttcattctcatagaaatctatgaggtataattcttttttttttttttgcgtttttaaatttttattttttagagacaggatcactctgtcacccaggctggagtgctgtggcacagtcttggctcactatagccatggcctcctacgctcaagcaatcctcccatctcagcctccccagtagctaggagtacaggcacgcaccaccacgcctggctaatttttgtatttttttgtcaagatggggtctcactatgttggctggtcttgaactcctggcctcaagtgatatgcctgccttggcctcccaaagtgctgggattacaggtgtgcgccactgcgcctggccaggtttttcacaagaaacccagaccgtgggattaggatgctggagaaagtggaagccgcccccatcctcacccccaccacacttccctgcgtgcatcccacagacccacagacgttgttcccaacactcgctctaccacaaaaatggttttgtcgcaagcattggtttgtgaccagctcctctgaagccagaagcccgttctctaaggagctggggctgggcagccaagccggccccggctgagagagcatgggatctgctgcctgtggctcctgtacgcctgtctgtcccatcggctggggccttggagggtgtccaggctgtctctgtggatgccgtgtctgctcgtgtcagggaagggccaggacactgaacagaagggacgcaggctccaactcgcctcggccacccactctccaggcagccttggcagggctgctggggctatgaaccctgagcaggcagcagggccaggggaggtcggaccatgggggctcacaacaagaggggctgtgcacaggggccacccacatgccctggagccaggaggccctggagtccctgggaccacccccaccccaggcagcctgggaaggctcagggtgctgggcccccacctgggagctgagagtggtcctgctctgcacttcccagacacccccagcagggtgcaccaccacacccagcctgcccagctctgctgcaggacatgggccagcgaggccccacagagcactgggacggggggagctcgggcagggggagccaagctgggcgtcaggggcctggggacgcaccacccccttggtttccacaacttgaaaacaagaactgatcagtcactgattcacagtccaaaaaccaacccccaaatcccagggcttctaacaacaaaggaggacctctctcacttctgggtcagcaagaacttcagggctgggcccactccatgtctcctccctgcagaaggaccctctgctctccgtccccagagcaaggcagtgggctgcctgggtttggagcagctgggtagggcgagggcaatgggtgggataggggggatgcagcccaggggggtgcagacaacaggcaaggagcaggccgggggccttgccagggccatctgtgtccctggtcactgagggtggcaggggagactggaagggaaacagacacccaggtggggagggccccaagccagtccccacggcagcccctgcaggcctcagtgcttctggatcccaccagggtcgcagcaggaaccgaggctgaagcaaatcagggcggctggtggcacagctggggccacacccaggcacaattcctttccaacacagccaggagactatcttggcggcaccagtgcctgctcagggacggacttggggcctccacaactgcagtccctatgaaccctgtgcacggtacaccctgactgcgtgggggctggggcccccagtggagggatgtggcttgttgtcctgaggagagcgggggcagctgtcccagggtgggcccagccctgtgaatcagggagcagctcatgggaatggccctgggggtgcaggggaagttcacagagccatttattgagccccacaaccgaccagagggaagggcgtccaccaggctcaggccatggtccttgaggggctggtgctgtctacttggcccacacatgtgtcccgaggagttgtggcatgcccgctgccctggtcagagctggccaccatcttccagctgcatctgccgggccagcgtctgcccaatggctaacagggggctggctctgtaggccggactggccagcagctcctgaaaccgggtcctttcttcctcgagaaactgctgtctctgggctgcactcatccggctgagctctgagggccagggcttgttgctctccctgctgcaggcctggcgccggctgccagcctcaagccccagtagctcaggcagggcatccctgagcgggtgcaggtcccccaccaccatcctggccctctacctccgctcctccctgtgcttctgctcagccagttttatggcttcgattttctgcaaccattgctcacgcctcagcttcattttctccttgggcaaaacggtcttggcctctgcacctctcctgatggaagtgacgctccttacgtccagctccagcttttgcaccaaggcactggggtctatcttggtcctggcaaagatgttggtgttgacgaacggaggtataattcttattagtcctgtttttatagatgaagacaatgaaacagctattgcaaacttataactgagaaagagatctgacctaaccaactgcatctgcttttaacctccaagctgtccttgttcattcctgggtgtagggtgaactaactttgggaggaacttactttatagtgtaaaacgaagatgttaacacccctttctcaaaacaaacctccttcttgcctggggactagactgcctttgtaagactaacaaattagttacaaaattagaaattgtggtttaggagtcatgcagctggaggctacaagattctaatcctccctaaactgctcctaagatcagtgcttgaggtattttgcagacccggcacttgatggatcagctggcacccagtttattgaaacactcagatcgataaactggctcatctgatcttgtggcccccacccaggaacggactcagtgaaagaggacagcttcaattccctatgattttgtctctgacctaaccaatcagcactctggactcactggccttcctccatgcaccaaattatccttaaaaactctgaaagctctgggagatggatttgagaaataatgaatctccagtctcctgtacagctgactctgtgtgaattcactctttctctattgcaattcccatcttgattaattggctctgtctaggcagtggccaaggtaaacccactggacgtttacaacactgaggcacagacaggttgagtgaccaacccaaagtttcacaggacacagtagagtcaggatttgaacacagacattctgactccagagtctatgcccttaaccacaactcatactaattcatttatcttttttgtccatgttttcatttattttctttaatctacaataaaactttgatttttacactggctgaggatgaagtaagaatgttgcaaatagaaaaatgttaactgaaagacacaatttatcttattctagcaccaaaaatgatcaggcctattttgaccatgaatctcgcaagctgtgctctctaaacttttggatgagagggcgtaggctcagagtctgggaactctgtctccctcgctccctctactaagtaggttccatgctctattcaagtttgagagactctgcttggttggggcctgcatttatgttactcctattctttatacttggcacatcacagaccatgaaaacgtaatctggtggaaatggcaagtttggatttttaatctcagttgttaaaatttttccaaatgagaacatttggacacagggcagggaacatcacaccatagggcctgttgtggggtcgggggagcggggagggatagcattaggagaaatacctaaggtaaatgacaagttaatgggtgcagcaaaccaacatggcacatgtatacctatgtaacaaacccgcatgttgtgcacatgtaccatagaacttaaagtataattaaaaaaataaaaaatttaaaaaaatttccaaatatatttatcttttgaataatctaaggcccttatccccctaaggtttacatggcatagttcatactgcttttacttttcaaagccgttaatcttttgtaataacattttgtattcagttatgttcctttgcttagttttcaaccttgttattcaccaagctgattttattaattaacacagagagagtcaggagtatctgaattaattaggtgatagtgaactaggaggaaatcacaggcctcagtgtgagacaaatctggatttaaatcccagctctaactcagtccatgaccttgaggaggtcaggtggggtcactgggctcagtttccaaatctctaaaatggagatgacaaaatccacctcacagaattgttgaaaggacaattacatgtttgagaacatgttactgtagtgtctataacctatcacgtgtatagcaaatgatgatgatgatgatgctaatttaaaaaatatctattgaaggtcccagaagttttactttaacatgttgatttttgtcccatggaaaggcacatgatttggtggaaaatataaccccaaatgttattatgcattgctctgtaagatattaacaagttttatatataacccaaatatcttaacattttaaaattaaatggtctataaatacctagctcctcaaatattgtttgaactggtcttaatatctaattgtttccccacctaattaatgagttgaacaaaatccttgccatatattcatattatatttgcatcagtgtcctaattatatcgtttgaaattatactttagcaataagaataaaagtcataatccaaatgttagcacttagcatgggaatgagtctatcagtcagggtttagtcaagaaaaactggtttctctagataatccaaattaaaaaggtttaatgcagatgtcaagaagcctatacaaccattggaagactaggggaagctgaggtcaatgaagccacggtggacaacctcagctcagctcccagctgaacagtttcctcttcattgtccattgtccttgaacttccagatatttctcttcaaccatcacagtctgcagtgatgaaggagtggctttctggtggagcctcttagcatctcatggttgtccacatttctgcctttaaccccctttagcctgtcatttgtttcagccttccaaatcttcagcaagggaagggacttcttggtaaaccaacctgtaaccatatgggaagggcgttctgcaaatgtagctcccaacttttctgaaagacagaggaacccttagaagggagagttggtgatgccaaattggcaataaataacccaggactgcagctcagctcagcacctaactccatagggcactcactcacttcaggaagggtgcatttactcagtaagacagattaaaggatcacttggttggtatggactcagacaaaagtgagctaagtgatctttaaacaaatttgaccaagctgagaaataccaaagacttatgatttttcaatcagaaaacacagcatggaatagcagaaagagtaccagactggaagccagagaacctggaatccagctcagcctatcctgaacttgctagctggggaagccctcagggtggtcacttcacctctctgtaattcaagttttgtcttctatgaaacaaggaaaatagtatctgtcatgcctcagagaatcaccacaaggttaacatatgtggaaatattttaaagtgtacaaacaccatatcaacattaaagtccccatatgaacatgaagacctaaggttttcttggtttagtctgaagaagcttccaacacaaggctggattaggaaagatgaaaatgaaataaaagttggacaggggctgggcgcagtggctcacgcctgtaatcccagcactttgggagaccaaggcgggcagatcatgaggttaagagattgagacaagcttggccaacatggtgaaacaccgtctctactaaaaatacaaaaattagctgggcatggtggcaagtgcctgtaatcccagctactcaggagactgaggtaggagaatcacttgaacctgggaggcggaggttgcagtgagccaagatcacaccattccactccagcttgggtgacaagagcaaaactccatctcaaaaaaaaagttggactgggagccttacagagttcacacatatttgtaacattcttcagatgtcgtgtgcacaaattggagttattagtccaatatttataaagaaaaatcatattttgaatgtagccaaataacttcctaattaaaatgatatgatccttagaaggtttttggggaggaggtaatggagagaggatcagaattaggaggatcaaagtagaatgcatatacttgaaagtaaatataaggccaggtgcggtggctcacgcctgtaatcccagcactttgggaggccgaggcaggcggatcacctgaggtcagcctgaccaacatggagaaaccccgtctctactaaaaacacaaaattagccggtcatggtggcgcatgcctgtaatcccagctactcaggaggctgaggcagaagaattgcttgaacccgggaggtggattgcagtgagctgaaatcgggccattgcactccagcctgggcaacaaaagcgaaactccatctcaaaaaaaaaaaaaaaaaaaaaaagaaaagaaaagaaatataatctttggccaaagaaaaataaaagctctacctaatcagtctgcagaaatgcctagaaaataaaccatcttctaagtatatcagcgattttaaagatgataaagtatgaggaagggggggagttgtctatgagaaaaagtatataattttacaacattttatgtttattaaaagggagcatgggttaaaaccaccatgagaattaggtcatcaaaccatgaacaatagactaatattcccccaaaattcctacgttgaaattctaattcccaatatgatggcattaggagatggagcctttcataagtgattagtgattcatgaattggtgaatgagattagtgctcttatcaaagacgtgcaagagatccactgcaagagaaatcaattgcaggagaagacacagagagaagacagccattgtctgtgaaccaggaaatggtctcaccagatactgattctgatagtgacttaatctcagctttccaagcctctagtactgaaagaaataaatttatgttgtttataacctacccagtttatggtatttttgtaacaaaaatttctgtaacagcctaaatggactaagataccatctctaagtagaacagtcatcctaaagtagttacaacacaacaaaaacaagggaaagacttaattgaaaaatttcattcatgagatgtaataaactaggtgaatttagtaatgggaaatgattctgcgagggacttttagcattttcaccctccagaagcatgtcagaaaaatctagcacattattccctgggtgggacagatttgggagaatgcatgctaccttatcagctctctgtccctccctgggagactgatgcttcccaatgcacaactcaattcaaagtagcaacgtactctgaaatttcatctctttctttcttctttctctttctttctttctttctttctttctttctttctttctttctttctttctttcttctctctctttctttttttcttttctttctttctttctttctttctttctttctttcttttttttctttcttccttccttccttcctttcttcctttctttcttttctctttctcttttttctttctttttttccttccttccttccttctctttttcttcttcctgagacaggttctcactctgttgcccaggctggagtgcagtggcatgattatagctcattgcagccttgaactcctggcctcaaactatcctcccacctctgcctcctgagtagctgggtctacaggcatccaccaccatgcttggttaattttttaaagtttttgtagagataaggtctcactctcttgcacaggttggtcttgaactcttggcctcaagtgatcttcccacctcagcctcccaaagtgttgggattataggtgtgagtcaccatgctcaacccagaaagtatttttatgtaaaaataaattatgcaatggcattttatgaacttcaaagaaaaatactttgtgttgttctcatatctgagaataaaaatgattaattttctaaacaaaacatattctgttattttacaacttttctcaaaatggaagggtttaaattgtgattaaaagtagtaggtagagtgtacacctatgttcatagcagcattacttacaatagtcaagattagaaactactcaagtgttcatctacagatgaatggaaacaaaatttatatatatatatatatatatatatatatgaatattattcagccttaaaagggaatgaaactctgacacaatactacaacgtggaggcatcttgcagacatgctaagtaaaataagcaagccacaaaaagacaaatactatgggtccacttacatgaagtgtctaaagtaataaaatgcatagaaatggaaagtagaattatggttgccaggagctgaggagaggggaaaatgaggagttgtttaatggggatagagtttcagttgtgacagatggaaaagctctggacattgattacacaacaatgtaattcacttaacgctattgaactgcacacttaagaatggttaagatggtaaattttatgttatgtgtattttaccactattttaaaaattagttgaaaaatagtaggccaaaatttgtttctaactatggcttcccaccgccatttagggggagttttgttgtgaaattttaggtgatttactttgtcaaattttactgagtcatgggtttgttttcccatggaaaaattactaaaataagggcatgtggaaatacataacacttaagtcacttccaggagaggtattgcaaaggtgtgtccataagacttttgactttgatgagataaaagctaggctgccttttcttccttctcactgcatcccatctcccagggccagcccgttcctcaaaagagtgaaaaacataggaaaattactgccttaactatcctgatcttcattttttttcctgtgtaaaatgaagacattaataaacaatgcctttcttgttagaaatgtaaaggtcaaacgtaaagaaatgtgaaatcctaagtcctgcatgccttctaccactgatctagtcacgtgtgccagctgaacattccctgggctgcaagtgatgtgactgatggttttatccctggttttcccagggagaaatctagacacagaaatcctgaaaaatgcctctgcggaaaggtggatccaaagtgggtcttctaagggaagctgcagaatgtttctccctcagcctatagtttgacagaatgctaagatatcaagatgaaactctgaaaacccgaggatttttcatggatttcattattctattgaagacctacaaaaaaaagtggctgataaatatatttttagaaattgctttagtatgatttttattaatttaaattaacatttatttaattaactacataaaatctgtgtataaaagaggcaaaagattattcttgctctcagccagacagttgctgataaggtagtttcgacaggaatctcatagaataagagggccctgactcaacaaccatcaatatggttggaatgtggtatttgctcttcctggaaacaatgcttctcacttatagagtttatattcaatgtggtgttaatacatagacctcatccaactatctgtctgtgaaatctgagttcctactcaagtcaatatcctgtaatatgctaaacaaaaaacctcctgtattagtttcctgaggccactgtaacaaagtaccacaaactgggtggcttaaacaacaagaatgtattctctcactgttgtgaaggtcagaagtccaaaatcaaggtgttagcagggacacccttccttggaaggttgcaatccttccttgcctctttcatcttcttctgggcctttgcatttcttggtctgtggcaggataactccaatctctgccagaggttacaaatggccttataccctgtgtctctgtatttttccctcttctcatacagacaccagtcattacactagatttttgtatgcactgtaaatccagggtggttttatcccagaatcctttttatatcccaaatatatctacaaagattctcttttcaaataaggtcacattctgatgttccaggttggaatgctctgaatgtttgtatacccccaaaattcgtatgttcaaactttttttttttttttgagacagagtcttgctctgttacctgggctgtagtacagtggcaccatctcagctcactgcaacctctgcctcctgggttcaagtggttctcctgcctcagcctccctagtagctgggattacaggtgcgtgccaccacgcccagtacttttagtagagacagggtttcaccatgttggccaggctggtctcgaactcctgacctcaggtgattcacccgcctcagcctcccaaagtgctgggattacaggcatgagccaccatgcccagcccatgtgttgaaacttaatccccaatatgagagtgttaagagatgtggctttttttggggggaggggtgattaagccatgaacactgattcctcatgaattggattaataccctataaaagaggcttcagggaccttggtcaacctttctgccatgtgaggacacagcgagaaggcaccatctatgaagcagtgagtaaacccccaccaaacactgaataggaagtcatcttgatcttgcatttcccagcctccagaactatgagcaataaattttcttttgtttataaattacctagtctatggtatttttgttatagcagctcaaatgaactaagacacagatgcgtataaatttagggaaaaattattcaacccactatacctctttccctttcactaattcctatttgattaatggtgcctgtggtttatttagtgacaacaatatctatggtcaatatgtgagattctcagaaaaggaaatgtagccatcagcagccaacagaaagtgggaggcaatggaaaacctacctcattccccatgttagagaaaaaaaatcaatacatgaagacatgaaataatgctttgtgggtctgttttattgtagcttctgtatatgtcaatcttttatgctcagctttcttcatatcttattttttaattttagtataaaaataaatgttttattgccttcaatttaccattattattttttacatcagttgttctttgtgtgtgtgtatgtgttggatttacttttctggagtgtgaatgcatgtggtatgtgtgtatgtctgtgacctaaataagtttttctcctgaaaagaaaacaacatcaacatttaaagatgaggttaacagaactcactttattaaatgcctgctatgtgtccaggccttgagctaagaaataagaacaatgatgaataaaggccattcctgctctcaaggtgtttgtagactacaaaggagcctgcaaccttgcagcaaaacaaaaaagtaaagaaacacaaaccacggagcatgttgcactcaacagaggttcattctcacccattgtgaagatgctgggagtaattggaactttgttgaagaaaacagggagatcatttctgttttatctgtgtatcactgtgactgcctagcaccatggagagagggtccccctttcagagcacaaactctgaccacagaggcccttggtctatcctttgttttactctaaacttttctcaaaataatcatggatgaagctggaaaccatcattctaagaaaactaacacaggaacagaaaaccaaatatcgcatgttctcactcacaagtgggaactgaacaatgagatcacatggacagaaggaggggaacatcacacagtggggcctattatggggtgaggggctaggagagtgatggcattaggagaaatacctaacatagatgatgtgttgacgggtgcagcaaaccaccatggcatctgtatacctatgtaacaaacctgcacattctgcacatgtatcccagaacttaaagtataataaataaataaataaataaataaataaataaataaccctttgtgaatctgtacttctgaagaaaagcccacacaactctgggacattagtatgcatcacaagtaagattttaaaaataatttaaaaagtgttatttctgtttttgttaccttgtcattaaataaggtttctatcttccttgacctctcaagatcagtgatttagctacatgtaaatgccttcttgcattggattcttcccataaaccagactgctcatttctctcgtggattgggccttctatgactgcacatatatagctgcttcagaatagaaagctactttctctcttagcaaggtacggcttttccaatgtcccctcttgctttgccaagttgaattccaaagttgtgttaaatctcagctaaatcagtgtatttgcctttcctgcttatggcattaattgcactttacccatgctattattttccatttaactttttagacttcctaattccttcatgtattctgggataccatttggatatggagatattatgcaaatgatgtagaaagggaatgaacttcagcactccaggtcagagttacttggctacttttaagtattttttgcaccttcttttttggtccttgggaaccttggacaataagctgttatccacttacatttctgaattatacttacatgaatctggtgccagagaaagttctatggtaaagaattaaaagcaatgatcccactgtttacaatcagagctggtgactaatgagggtgcctctcctgactcctatccctcttgctaaccttcctcagaggagtaaagttcattgaggctgagtatcttccagactcctattttcttccacataaaactatacattttgtgaaaaaattggatcagggattttactctctcaggcattaactagtaattcattcactttaagaaaagtgcaaggagaggggacagaatgaaaattgtaagctaccctttggatgggcttatgaaaggcccatttactcacagactataagaaatggaatgtgtatattaacaaaaagcaaactggaatcagccatgaagttgtgaatgtaggagaggggattctccatcttattttgtttttccttttaacttaagagccaattttgctaaggaagccaaaatccctgtctgtctggcccatcataatcggatgtatgtagaaggtagacagacaaggcacatgacaatggcacagatgccgttgggtttatgtctgtcaaagggggagaaattgttcttttaagatccagattttgaaggcaaataaacaaaaatttcagtcccaaacccacctcctcctcattgtgtggtctctagtaagtttctgaaaatgtttaagcttggctttgtcagctagaaagtggcaataatcatttaacccataagtaccaggtcctggctggatcagttggcatgctaaaaaaaggataactgaagagggtttaatcaagagttcattcagggtatggacaaagctaaggaacccactagaagcaatgacgcacccaaggactagaggtggtgaaggccattcctaccatcagtcctgtagggatgggggaggtaggagctcttatcagagcactggggaacctgcacatgggagatactacccagcaagagctgcttcagtgagggatgctgccaccgccactgccacatcactgcctggccaggtgggggtggaataaaccccactaaggctctttcctcttgctttccaatcccatggcaatgtgctccattggctgcacttgacgtaaagtcagaggacaaaggaagagagtggccaaggaggtgagcttcctttgcacaaaatcaggttagaaaaggatgaagagtggatatggaggagcaaatagataattttcagcatctgtctgtattagatgactgttgtttgcccagtatcccttcttttgagtaaatgctatgcctcgctccataaaacttgaatgaggctgaaataacatttacccttctccaatgaccaggaccagagaacttcatcaccctaccctctagcaaatcaatcaaattcaaatttgagatttaatacagggtttctggaaaatagataatctctttttcatttggattatgagccataaggatgtagacttgggccaagcaacagtcatctttccaattatgcagaaagaactagcctgacagcaaagacaatgcaaaaagagcacagaagagtccaggaatagggagaaagaggcaggtccatggtgactttgtttgaggccctttgtttaattatatctaaaggcagatatgctttttaacatttcagtaatatgctttttaatatcctatattggaagagtggaaaaagttaataaggaaatgtgaagcacccagaggttagcaacaacagaaagtctctatgatatcagaaatggagcacaaagggaggcaatggcactacgggattctctgagttggggcctcagtaggacctggaatcatggagaaggaactgcttaggaaatgccaaggctgccaggctggaagcatggcaaagactgcacaacaggaaccgaaaccagagaagagatgctacctcaagtacagagagtgagaagaaatagtctggcttctccttcccttccaccctttggatgcctgctcctctgccttcacttagctaaacctaagtctgagactaacattcagagctgagcagaaaaaggggcagggtatggctttcagagcaaatgagtaatacacgtggtcaggacatattcgttcagttttcctctttccttccaaaatgcattccaaactttaatgaaggatacacaattttttctcaaatctcagagaatgggggtcaggttattttctgcttagaaacttgagtgggttactacataagacaaggcaatttggtctgatattcaagttcatttagactattgccataatttatgggcatgaaataacatgatagaaaaatgtaaaggtaaattgaaatccagtcacattaggctacttgctctttttgattagagtatattttcctgcacttgctaataatattccttctgccaggcttaccatctgcttccccatttttctttactgagattttatcttcacatcacaaattaagtgctattccttcaagaaacatactggcttgcccaaactttgttgtatctctcccttcttaaactcttatatcattctcatggcactcaacactttggatcttgtgttttagatattgaaatttctatcatatgctttgataatagattgtgatttctgcaaaggcaaagagtgatttcctcaactttgtatcctttggggtgggtttaaatgatctcttatacctactaggtgtttgataaatgtttgttgtagcagatgaacacctgaaacagtaattcagaaccttaggttctagtattttctatgtcacattagtgtgacttgcagaatggctcagcttaacttttcctatgtataatgaattcagactagatgaattccaaggtccctcctggccctttcaattccctaatttcaagtggaatttagaagaaaaaatttgtaagcagcaattttatagttcaattatggaatttctacttggggaaagctaacatttcatgatctcattcttgctggattctttctcaagattttccatggagctgaaatttacccatgaccttgagaaagaaatgcacatgcttcatgatcctcactccactttcttgtccttaatgcttttcctctgatgattgctcatttcacaccccaaaaggaactcattttataaacgttttacagcgcagcaagcagtaaagaataagaaattacaaaatattatatcctatgaagaaacactctcctaatgcatccacaaagaatcaagctcataattgctggtttgtcaattataatggtaaaatatgtatttatataatacatatgatatgatggatgctattggagtgagtttggcatatttatttatttattttttatggtactcatccatgtttctgtttatatataggataacaaattcagaaacaatgggaaagtaatatatgaaaccttaatagaaaatacaatagagatcacaaaacactgccatttgattttttatgcaaatacttcaatattccaatatttttactcacttgctaaataaagcacatgactcgaaatgctaaataattctgttagtctaaatcttttagataaaatgttggtgaaaaaccaaaattatttagtaaggtatgtatgaccttgtttattatctatcatagacatcaagatgatcatagttaataccaatttaagctttatagaatactcttttaggcccaatattgatatattaaatgaaggtatcagagaatcttgtatttatggcatcaggttataaagatctattcaaaaccatttttgtcaaagtttaaacactggaacaaaagtcaaattgtttctaaatgagacacaaatgattcttgctaatagtacaaattttgtcccatgggtaatactattgtctttttcttttttaaaacaattatttcaatttttttttagattcagggaacacatgggcaggtttgttagctgggtgtactgtgtgatgttgaggtttagggtatggatgatcctgtcacccaggtagtgagaagagtccccagtaggtagtttttcagctcttgttcccgctccccaccctacctccccagtgtctgttattcccatgggtcctcaggtattactattttcaagtttttttctttacatgaaactactgaaagcaaaagtatgtcatgcttgtaggttactctgtacatttatcattctattaataaacatcttaagtaattaagtagtgtattaaggccataaaccaagtcattatctcctatcaaaggactactgttattcagtcgtctagaaaattcattttaggcaggacacagtggctcacttctgtaatctcagcactttgggaggccgaggtgggtggatc

SEQ ID NO: 69 - DNA, 1815 bp, Homo sapiens
  Genbank Accession No. M22960
ggggagatgatccgagccgcgccgccgccgctgttcctgctgctgctgctgctgctgctgctagtgtcctgggcgtcccgaggcgaggcagcccccgaccaggacgagatccagcgcctccccgggctggccaagcagccgtctttccgccagtactccggctacctcaaaagctccggctccaagcacctccactactggtttgtggagtcccagaaggatcccgagaacagccctgtggtgctttggctcaatgggggtcccggctgcagctcactagatgggctcctcacagagcatggccccttcctggtccagccagatggtgtcaccctggagtacaacccctattcttggaatctgattgccaatgtgttatacctggagtccccagctggggtgggcttctcctactccgatgacaagttttatgcaactaatgacactgaggtcgcccagagcaattttgaggcccttcaagatttcttccgcctctttccggagtacaagaacaacaaacttttcctgaccggggagagctatgctggcatctacatccccaccctggccgtgctggtcatgcaggatcccagcatgaaccttcaggggctggctgtgggcaatggactctcctcctatgagcagaatgacaactccctggtctactttgcctactaccatggccttctggggaacaggctttggtcttctctccagacccactgctgctctcaaaacaagtgtaacttctatgacaacaaagacctggaatgcgtgaccaatcttcaggaagtggcccgcatcgtgggcaactctggcctcaacatctacaatctctatgccccgtgtgctggaggggtgcccagccattttaggtatgagaaggacactgttgtggtccaggatttgggcaacatcttcactcgcctgccactcaagcggatgtggcatcaggcactgctgcgctcaggggataaagtgcgcatggaccccccctgcaccaacacaacagctgcttccacctacctcaacaacccgtacgtgcggaaggccctcaacatcccggagcagctgccacaatgggacatgtgcaactttctggtaaacttacagtaccgccgtctctaccgaagcatgaactcccagtatctgaagctgcttagctcacagaaataccagatcctattatataatggagatgtagacatggcctgcaatttcatgggggatgagtggtttgtggattccctcaaccagaagatggaggtgcagcgccggccctggttagtgaagtacggggacagcggggagcagattgccggcttcgtgaaggagttctcccacatcgcctttctcacgatcaagggcgccggccacatggttcccaccgacaagcccctcgctgccttcaccatgttctcccgcttcctgaacaagcagccatactgatgaccacagcaaccagctccacggcctgatgcagcccctcccagcctctcccgctaggagagtcctcttctaagcaaagtgcccctgcaggcgggttctgccgccaggactgcccccttcccagagccctgtacatcccagactgggcccagggtctcccatagacagcctgggggcaagttagcactttattcccgcagcagttcctgaatggggtggcctggccccttctctgcttaaagaatgccctttatgatgcactgattccatcccaggaacccaacagagctcaggacagcccacagggaggtggtggacggactgtaattgatagattgattatggaattaaattgggtacagcttc

SEQ ID NO: 70 - DNA, 487 bp, Homo sapiens
  Genbank Accession No. AF086236
cccacatcgcctttctcacgatcaagggcgccggccacatggttcccaccgacaagcccctcgctgccttcaccatgttctcccgcttcctgaacaagcagccatactgatgaccacagcaaccagctccacggcctgatgcagcccctcccagcctctcccgctaggagagtcctcttctaagcaaagtgcccctgcaggccgggttctgccgccaggactgcccccttcccagagccctgtacatcccagactgggcccagggtctcccatagacagcctgggggcaagttagcactttattcccgcagcagttcctgaatggggtggcctggccccttctctgcttaaagaatgccctttatgatgcactgattccatcccaggaacccaacagagctcaggacagcccacagggaggtggtggacggactgtaattgatagattgattatggaattaaattgggtacagcttcaaaaaaaaaa

SEQ ID NO: 71 - DNA, 86080 bp, Homo sapiens
  Genbank Accession No. AL008726
gatcagagtagtaaagggtgaggcagcatggtaaaatggggagagtacaagccttgaagtccaaaacccaagatccaaggccagcctctgcgagttgtgtgaccttgggccggtagcagtgcctctctgagccatttcttcatctgtgggattggacctgtctgtggggtctccctcacagagagaccatggtaaatgggaacccgggtataagtcacctagcttgtgctgggtacacagcgttggtgcttggcaagaggaatgtcccgtctttgaaccatggtaaggggcaggggataggaggagaaagtgacaggtaggccactgtttactgaaccccatgacgtgccacacactgtgctaagcattttaacatgatctcatctagtgctcctcctatgaggtagcaacgattatccccacttgactgcagagctttgtaaattataaaggtctatactcactctgtcaccaaggctgatgtgcagtggtgctattatagctcactgcagcctctatctcctgggctcaagtgatcctcccacttcagcctcccgagtagctgggactagaggtgcaccaccacccctggctttttttttttttgtatttttatagagatggggtttcaccatgttgcccaggctggtctcgaactcctaggctcaggggatccttccaccttggtttcccaaagtgctagaattacagtcatgaggcaccatgcccacccatgttgatgattcttattattaatcctgactggagggaagttgggacagacagtccttggggcacctgtccagatggaaaaatgtatggagggatggaggagaggaggatgtgcatttggaggagaaataatcattgaaagcaaagatccttctctgaaagttaccttctccagggaaagggtgtttggattcactttttttgaagtaaggagtaggcaggggaaggttctttaagtggtaaaaggacagctggccccttcctagagctcagtgaagaaatctggtcatctggggagtaaaggggtgggcagaccaagtccagagggagcccaacctgagaatccacaaggtgcaggctgggcactggggagtaggcaaggcttgtagacagtggctacgtggacagaaagagcaccaagacaaccgatagcaggctctggggccaggaaaggggggctggacaccaaggaatgcagatggacagtggcaactgggctgcccccttcccctatatatagacattcccaaggaaagctcagcagggctgggccaagctaaataaggcctcccccaggcaggcagggtgccaaagggtgagggagacccatgggattccaatttagtttttattgttttttggttttttggggttttgtttttgagacagactctcactctgtcacccaggctggaatgcagtggcacaatctcggctcactgcaccctccgcctcctaggttcaagtgattctcatgcctcagccttctgagtagctaggattacaggcacataccactacgcccagctaatttttgtttttggtttttttttttttttttttttgagacagagttttgctcttgttgcccaggctggagtacaatggtgcaatctcggctcaccacaacctccgcctcttgggttcaagcaattctcctgcctcagcctcccgagtagccggaattacaggcatgagccaccatgcccggctaattttgtatttttagtagagacagggtttctccatgttggtcaagctggtctcaaactcccaacctcaggtgatccgcccacctcagcctcccaaagcactgggattacaggtgtgagctaccacacccggcaaattttttactttttgtagagacaaggtttcatcgaccgggcacggtggctcaggcctgtaatcccaccactttgggaggctgagatgggcggatcacgaggtcaggagatcgagaccatcctggctaacacagtgaaaccccatctctactaaaaatacaaaaaaattagccgggcatggtggtgggcgcctgtagtcccagctacttgggaggctgaggctgaggcaggagaatggtgtgaacctgggaggcagagcttgcagtgagccgagatcacaccactgcactccagcctgggcaacagagcaagaccccgtctcaaaaaaaaaaaaagtttcatcatgttggccaggctggtctcaaactcctgacctcaagtgatccgcctgcctcagcctcctaaagtgctaggattacaggcatgagcccctgagcccagcctttgttcttttgtttattcaagggattaggtaaggcccaaattgcttaatgtagccaagcaaggtcccattggcccttctaatctcactccttccctccacatcatgttgctgtctgctctgatcagactttaaaatactgctctaggctgggcacggtggctcatgcctgtaatcccagcattttgggaggtgcaggctggcagatcacgaggtcaggagttcgagaccatcctggccagcatggtgaaaccctgtctctactaaaaatacaaaaaattgctgctgggtgtggtggtgggcgcctgtagtcccagctacttgggaagctgaggcagaagaatcacttgaacctggcaggcgaaggttgcactgagccaagatcatgccactgctctccagcctgggcgacaaaaggagactgcatctcaaaaaaaaaaaaaaaaaaaaaaagactactctaaacaccaccttctatgaaccttcaagcctttgcacatgctgtttttttctgccagaaactcccatctttcctctcttcatctgtctacttccctatcatctttctaagctctaacatcacttcctcggggatccttcccccactgtgtccagaccagggagtccaaggtggtctctagtagtttcctcaatcatagcactgagcataccttatgctcacaacccattctatgttctacagatcatcacatttcccagtgctcagcacttgctatgtagcaggtgttcaacagatattatattctacataagaataactgaactggatggtatttagttcaatataagggggaacttcctaatagtcatagttgaacaataatgggaacaggtggcctcaggaggtaatgagctccgtatcactgagtatacccaaacaggagctagatgaccatttctcagggaggctgtagggagatatccatacagaatttaagaatgggggcagtggctcacacttttaatcctagcacattgggaagctgaggcaggtggatctcttgagcccaggagttcaataccagcctgggcaacatggcgagacgctgtctccaattaaaaaattaaaataaaacaaagaatggtgggtggtagctcatacttgtaatcccagcacattgggaggcagaggtaggaggatctcttcaggccaagagttcaagatcagcctgggcaacatgcaaccccacctttacaaaaaataaaatactagccaggcatggtgggcacatatctgtagtcccagatacttgggaggctgaggtgggagaatcacttgagcccaggagtttgaggctgcagtgagctatgatcgcacccctgcactccagcctcacaacagagtgagactctgtctctgaaagaagaggccgggcacggtggctcatgtctctaatcccagcactttgggaggctgaggcaggtggatcatttgaggtcagcagttcgagaccagcctggccaacatggtgaaaccccatctctactaaaaatacaaaaattagccgggtgtggtggcacatgcctgtaattccagctacttgggattacttgtaattccagctacttgggattacttgaggcaggaaaatcgcttgaacccaggagatggaggttgtagtgagccaagagtgtgccattggactccagcctgggtgatggagtaagactctgtctcaaaaaaaataaaataaataaaaataaataaaaaaggaagaagaagcaggaggaggaagaaggaagcaaaaagaagaagaaataataatagtggagaatgcgcaaccttcagatctcctagttctgactgtttatatgacccagcataagcccttcccctcactaagcctcagactacctatctgtaaaatggaggtgataggccagatttctgaggggccctcctgctctaacaacccatggtttcatgaagaccagctttgtgcccagacatgtaaggcatataccgaaggacaagttattttttaaccaatggttggtgaatgagtgagtgttgaattaatgaatgaagtatgccttttttgtcccaatatcttgcccataagccaaatgaagagtaattcgaggtttgaaattgtgcaaactggccaggcacagtggctcacgcctgtaatcccagcactttgggaggtagaggcaggtggatcacttgaggccaggtgttccagatcagcctggccaatatggtgaaaccccacctctactaaaaatacaaaaattagccgcatggtggcacatgcctgtagtcccagccactcaggaggctgaggcaggagaattgcttgaacctgggaggcagaggttacagtgagccaagattgcatcactgtactccagcctgggcgacagagcaagactctgtctccctctctaaaaataaataaataaataaataaaattgcacaaacttaggcttaaaatcccagcccctctatttcccagatgtggatcttggggaagtcactttgcctcagtttcttcatcttgaaaatggaccattaatgtccagttacagcctcttccccaggacgctgtgagggagagatgtgacagtaaagtgcctagagcaggatgtagaaagtggaccctcagaaaataagaaccccagcctttctgctcacatgggagggcagggagctgaaataccttctgcttatcccaaggcattttcccccacccttctctcctgtgccactcagaaagggtaggagctactttggagagattttgattttatttattgtattgtataactatcaaaatctgccctaacaactgatacctaggctttgtgacaggaagccacaataactttttcttgacctgcagctgccctgcggataaaagataaaacaaagctggggagccactgagattatcaggcctgctgcacaggaaaagggcagtatgcagcaggggacctgggctccaggccccatactcagaaacctctgagggaggcagaggcaggtggatcacttgagcccaggaattcgagaccagcctgggcaacatggccaaatcccatctctacaaaaaatacaaaaattagctgggtgtggtggcgaacgcctctattcctagctactggggaggctgaggtgggagggatgacctgagcccagggaggcggaggttgcagtaagcagagatggtgccactgcactccagcctaggtgacagagtgagactccatctcaaaagagaaagaaagaaagaaagagagagagagaaagaaagaaagagagagagagaaagaaagaaagaaacctctggcaagctgtgtggttaagccaagtaactcaccctctctggtcctcagtttccctgtttgcctacttcccatgtgtgaggttcaaatcagattgtgcaagcctgtgaacactgtagaaacaataatcattatgtaagtgatcatttcgtcagcctttgctctatgccaggcacgggacgagcgttcttacaagagctgcaaaattagttttagcagtattgttcctgttttacatatgagaaaacctaggctcagcgaggtcagattccaaccaacccaaatcacgcatcttctcctggcccttcgttttctctcgggagacatggcctccctactattgcataattactttgtgaagttaaagagcgttgggtggaaatgagtgggacagattggagatgacgtgggtggggtgggaggattcaaggagggtacgcgcctggccggactgggatgactctgcggcaggcctgggactccctcaggccgacccaggcttcccaagtccctcctggagccaagggcccgggattctcgggcggctcgggcgagcgggcggggcaggaggcggggcggcggcaggaagctgcccgagcggcgctctgagcggcctgagcccggcggagccctgcagaacccggccgacctccatgggctgcggggggctgcacccggacccctggggcgcggcgcgcccctgaatgcaccgtgggacgcaggaggtagaggcgcacgaggcggcgcaagagacatcgggagggtcctgagcccctccggggaggaacgcggtcctaggctgagtgggttggggggaaagcgatgctggctgggtcccctggttcgcaagacctcggactgccagggggtggggcctcaccgcgcccctccctctccggttcgggccccgcccctcctcctcctgcgccgggctggggtacccctcctccgggatccggtacacagcgtcgcgcgctccccccagggtgccatggcctcccggctcctgcaccggctgcggcacgccttggccggcgacggccccggggaggcggcggccagtccagaggccgagcagtttccggagagctcagagctggaggacgacgacgccgagggcctgtcctcccgactcagcggcaccctcagcttcaccagcgccgaggacgacgaggacgacgaggacgaggacgacgaggaggctggccctgaccagctgcccctcggggatgggacgtcaggagaagacgcaggcgagtgcaggaggacggaggcgggaaccctggggctcgattaggcctccatcccagccgcgttcccagagcatccagggcgctaagttgatccagctgaaactcccacacttcttaaagcgcctgggccacctcttggctgtgtgaccttgagagagtcttaacccccctctgagccaagttttcccttgtgtcaagtgggagaactcactctcatctcagaattgctgcaggcattaaatgtacagggcttgggatccgaatggaaatgatgtattaacgatattttgagggtggagctattaatttagcccctactgtctgccaggcacggtgtttggctcctcggtgcctctctgtccctcagtttccatttctgtaaaaagggggtaagtcctgcctcacactgggaggatgagtgaggccacgtcagtggttgatgtcgaccctggccctaggcccattgatatgactggtcatgtgtctgcagaacggagccccccacctgatgggcagtggggcagtcagctcctggcgcggcagctgcaggatttctggaagaagtcccggaacaccttggcaccccagcggctgctcttcgaagtgaccagcgctaacgttgtcaaggacccgccctccaagtacgtggtgagtgagggtctagaacccctgggctgtgagtccagaagtatggctaggagcaagtagggaagaccccaacttcctgaggggtctatgtagttataaatggttaccttgtttacaaatggggaaactgaggtcagaaaggggatgtaacttgagcaaatcctcacacaagacttagtttccttgagactgactgaagtggggattaaggaccttcctcttaacctggttttgagactaagagaactggtgtgtgcacttccccacccagcccacaaggtttttgcaaattgtagcaagatgtgagatacagagagacagatgttatctgggtcaaacttgagatccaagttgcatgggctggtagttaaggaaataggctttcgatccagaccaatcttgactcccacttatttccagttgtttgactctgggtgagttgtttaaccttggtcatcttccgtttcctcattatagcaatggggaaaatgcagaagattacagcaggagttaaatgagacaatggacaaaaagcccttagcagtgtgcctggcattatgacgtggtcaatgaaatggtagctatgtcatcattatttaactttgggttgaaaatgtttgtcatctagggcctgctgtgtccttataacgcacaggtcaatcagttctcaagcacccgaccttgtccctaagggctagacttagagggttggtggaggttaggatgaagagcaatgttggggaggaccttggagtcccttgctgttttccttgctgttgagagactgacttggagaatgaggtctgctcctttaatgcccacagcgactcctgctccagtcccttttcaggccaggcctgaaagccagctgagctggccactcctgtcagtggcagctctccatctctcactcccctcctcttcaccacccttctccacctctgactcagcaggagggggcctggagcccagtcccacatctgggcctctccacccttttctgttgctgttagtaagcaagggccacacccatggggtgactactccaatttcagcagggaccgactccgattattgagtcttttaaaaaaatttttgaggccgggcgtggtggctcacgcctgtaatcccagcactttgggaagccgaggcgggcggatcacgaggtcacgagaccatcctggataacacggtgaaaccccgtctctactaaaaatacaaaaaaatagccgggcatggtggcaggcgcctgtagtcccagttacttgggaggctgaggcaggagaatggcgtgaacccaggaggcagagtttgcagtgagccgagatcgagccactgcagtccggcctgggcaacagagcgagactccgtctcaaaaaaaaaaaaaaaaaaaaaaaaaaattttgagacagggtctcgttctgtcactcaggctggagtgcagtggtgcagtcataactcactacaacctccaactgggctcaagctatcctcccacctcagcctcccaagtagctaggactacagctgtgcaccaccacgtgtggccaatgatgaagtctgaagtggcaaaggtctcagaactctgggttcatacactggaaggggacaccaaggaatagttcagaggctgagaggaatgggggtgactgtgggtacctggatgggaagggatgacaagatagagcaggatggccaagtatgccccggcctgtgtctggagaagcaaggcacctcctgtgtacaatggggaccctaattccccactcaacttgtgggggtgaagagcacaggctttggaatcagatcaacctgagtttaaatcccagctgggctgttttccagctgtgtgacttacggcaagtctttgagcccttttccccctctttgagcctgcttcctcagctgtcagagataaggaccttccttgcagtgctgttgtgatgattaaatgaaatcacagatgtaaagagtgcttggtacaacaggaggcacagggtaaatgcttgggtaatggaactactgtcattatcacccatctggctgcatgttacaaggtcaatgagataatggatacaaaatgtaaactagatgaacataaaggcttattatatagaccagtgtgtcctgaagaaaactggtgtcctaaagtgtgtcctgcagaaaactagttccctggaatgttaatagctgtttctaaataaaggttttgcaggcaatatgttttgagaatgcagagttaaatgagaatacaataagtttctttattgttaaagtatttaatccctaatagtgatatacactgtgaatcttcaagaggacagagtaagcaaacctaactgaccaggagtggctagagtattgtcagttccacagaacaaatgtgagagaaagatctggatttggtgttagggtgcctttaacatctaacactggttaactctccttttaaacctgttggcttggcattataggttaatccatattcaggttctcagacctgggaggcggggaacttcgtgatcatcttgttcagtgttttccaaacctcagtcattccaatacctccctgattcttgtcctatctaaaaatgccacttgtgtccttttcttcttaacatttttctttaaatgaacctatttttttttctttatctttttttttttcttttttgagacagagtcttgctctgttgcccaggctggagtgcagtggtgcaatctcagctcactgcaacctccacctcctaggttcaagcaatcctcccgcctcagcctcctgagtagctaggattacaggtgcccaccaccatgcctggctaacttttgcattttcagtagagatggggtttcactgttggccaggctggtcttgaactcctgacctcaagtgatctgccgcctcagcctcccaaagtgttgggattacaggtgtgagccactacgcccagccgaacctattttttttcttaaataagtttatcgagacggagtcttgctctgtcgcctaggctggagtgcagtggcgtgatcatagctcactgcagccttgaactcgtgggctcacatgattctctgcctcagcctcctgagtagctgggaccacaagtgcccaactaattctttttctttttctttttcttttttttagagacagggtcttgccatgttgcccaggctggtctcgaactcctggccttaagctgttctcctgcctcagcctcccaaagtactgggattacaggtatgagccactgtgcccatcctttaagtaattttaaaagacaacttcatagcactaccgtacgtggaaagtctcacttgccaccgagagaagctagccataaaaataaaaggtgaggcacggtggctcacacctgtaatccccgcactttgggaggctgaggtgggcagatcacctgaggtcaggagttcaagaccagcctggccaacacggtgaaaccccgacactactaaaaatacaaaaattagccggatgtggtggtaggcgcctgtaatcccagctactcgggagattgaggcaggagaattgcttgaacccaggaggcagaggttgcagtgagcggagattgtgccactgcatgccagcctgggcgacagggcgagactaaataaataaataaagtaaataagtaagtagtgaaaatgaaacgtcattaaatcttgcctagatgttgttgcctgaaggaggccctgacctgagatccactttctgactcttttctaaaaatggagatgagaagtgttagagaagtactttttttttttttttttgagagagagtttcactcttggtgcccaggctcgagtgccatgagcaatctcggctcaccacaacctccacctcccaggttcaagcaattctcctgcctcagcctcccaagtagctgggattacaggcatgtgccaccacgcctggctaattttgcatttttagtagagacagggtttctccatgttggtcagcctggtctcgaactctcaacctcaggtgatccacctgcctcagcctcccaaagtgctgagattacaggtgtgtgtgtgagccactgcaacctgcccaagaagtcctttttttaaaaccaaactgagagctggccaggcgcggtggctcacacctataatcccagcactctgggaggcaaaggcgggcggatcacaaggtcaggagatcgagaccatcctggctaacacagtgaaaccccgtctctactaaaaaatacaaaaaattagccgggcgtagtggcaggcgcctgtagtcccagctactcgggaggctgaggcaggagaatggagtgaacccaggaggcggagcttgcagtgagccgagatcgtgccactgtactccagcactccagcctgggcaacagagcgagactccgtctcaaaaaaaataaaaaaataaaaaaaccccaacaaaaccaaactgagagcttctcaatttgtagtcagaaagattaaaaaacaattaggctgggtgtggtgctcatgcctgtaatcttagcactttgggaagcctagctaggaagattgttcaaggccaggagttcaaggccagccctagcaacatagtgagaccccccctcatctccatacaaaaaaaaaaaaaaaaatttttttaaatagctgagtgtggtggtgcatgcctatagtcctagctacttgggaggctgaggcaggaggaatgcttcagcccaggaggttgaagctgcagtaagctatgattgtaccagtgtactccaacctggccaacagtgagaccctgtctcaaaaaataataattaaaaggggaccaacctcctgatacagtgatatttactctagtgcacaccacctaaaaacctcaggtaccaatacttgtacatgtctcatttttggacaaacactgacttgaccgagcacttccttcactagaaacagaagtggacccagagggggactcccttgcctgggtcacacagagaaggagtagctgacctggggttagaacttgagtcctaggccagtatacttttcacagttatggcagttgtggctatctacagacctgtcctctgggtctagtttggaaaagcctgaccagggatgtggaggccaggtgtccaaagtggaacaagctccaagctggtcctaaaggagccccaagagattggctggggtttcagcttatgtctggttttccagagggggctgtcagaagaactaatgctctatgggaagggagtacaaaaaaaggggcagcagccccgggcactgaagctcatctctgtctttctctcttcttgctgccttgggcctgggtcatttcagacaaacctcaggtaagatgggactgggcttccccgccactgcgcagcagctcccgccctcctgggtgctgtcccaggggtgaaaggaagaggtggggaggtacagctgggagtgtgggggatggggaaggatggggagggaacgggcccgtggacaacttgcatttgccctgacacccaccctccctgcagctctacaccctcgccgtgatcggcccaggaccgccagattgccagccagcccagatctctcgccgttactcggactttgagcggctgcaccgaaacctgcagcggcaattccggggcccaatggctgccatctccttcccccgtaagcggctgcgccggaattttactgcagagaccattgcccgccgtagccgggcctttgagcagtttttgggtcacctgcaggcagtgcctgagctgcgccatgccccggacctgcaggacttcttcgtgctgccggagctgcggcgggcacagagcctcacctgtactggcctctatcgtgaggctctggcactctgggccaatgcctggcagctgcaagcccagctgggcaccccctctggcccagaccgccccctgctgaccctggctgggctggccgtgtgccaccaggagctggaagaccctggagaggcccgggcatgctgtgagaaggccctgcagctgcttggggacaagagcctccaccctttgctggcaccctttctggaggcccatgtccggctctcctggcgcctgggcctggacaaacgtcaatcagaggctcggctccaagccctgcaggaggcaggccttacccccacaccaccccccagtctcaaagaattgctcatcaaggaggtgctggactaacccttgcctagatttaaggccactgtgaggagaggggttgccccagaaggcaggggaaggacctgatgagaacagaatagctgggaggctgcagagggtgctgggagcccctagaagttccaaaagagaatgtgaagcagatcaaggaaacttctgttgagctaggctcagggtgagctttggctggggttgcccttgtgtagtacagggaagtctgacacagcctctccagcctataaacagccggggggctgtggcacaggttggggcaatgttcccttgttggtgggcccccaagctggcaaggcctcttggctgaaggccagggactctgcccctggagtcctggagttaagggatgaaggcaaggctgcaggtctggcccaggggaattaaaagccagccactccagtggtatcagtctctttattggatgtgagggccaaaagggactgtaactcctgtctcaggaatggggatagatgggaggttcttgaagccccaggcgaagctggtacctctggctacagcttgctctctgagacctggggcttcactcggatcacgccctcctgggcacaggtcacagctaggactccatcctgacgccacagccgcccatggaccagcccccgagagccacctgtgggtgaggtgaagggtgatgatggcctgcttcagaacagccaaatacactttttttttttttcctgaaacagagtctcactaagttgccaggctggtctcaagcgcctgggttcaagggatcctcccgcctcagcctcctgagcagctgggattacaggcgcacatcaccatgcccaacctccaagtggacttcttgcaaagggtctggcccagggcagggctgccccacacaagggtgcactgagtgtcgtggctgctccaaatgccccttcatgagcttattatggaccgtcattgaggggtaactcctcccacaggaaccccagttgacagtttaaaagcactttcacacctctcctcgcttcctcaaaaagatcacagagggaggagctctgagaacagtctccttcaacagttcggccaagcagaactgctgtacctctgaccacttgtgttaggaaaactatcggctccctgtataataaatcaagccaggtcctccaagtggtaattcatgaaaaatatccccactaccaccaccaaggggaagaaaggactcagaagagaggacttgaggccatgaggtctggcctcttccctccccatctggagactctttctcccttgctggctttgggcccaagtttgatgtttatgaggatgattgctggtttcccttacacatagcagagctcactcagttctcacagtagccaaatgaagcagttatgtgttgtccagttttccagaccaggactgaaatccagagagggtcaggaatttggccccatgatgaagccaaatctgaacccatgtcctcacttcaaggttatcaatcttggattgtgatgctattggtacttgagaataccccttatctgagtataaagaatccttgagttttgtccttggtttatcaagcaaagcttttcttcatttgaaatgtactcccttggaaaggaggtcagggttctgaagctagacattgatgaacgagtcttgtttctctcccctgcaaggaaggtccaagcaggcccttagggaccactgaatgccccgatcccaatcaggttaatcagaatcacttagagaacttaaaaatacagtttcctggaccttatccaagacctactgagtgagaatcttgagggtggaatcagaatctattttgaaaaggcatccccaaatggcagtctgatggactgcgggtttggataccactgctgtaatgtaaccctctttgtttagatgaggaaactgaggttcagatggaagatatgatttgcctattgtaatacaaagaatctgaactggttttgggactagaactgggtccctgggagaaggtgaatcacatttccagcacattctagaaatttagagcagagcaggtgtcccggcctcaccctctcattttgaagatgaagatgccaaagcctgggagggaaggaaaggaagtgacctgtgcagcgccacacaggaagtcgggaaatcagcatcacccaagaaagcaggctcctgccactcaaggtcagtgcccttgtcccacacggccccacactcaccggcccaggggctctcgcattcatagagcatccagtggtcagctcggaagggggcgtggaaccacatggaatggtccagtgagaccatgaagtgcaccttgtgctgccactggtgaggcagcagtgcagtgcccaagaaggcatagtcggagatataggcggccacgcagcagtgcatcttcatgtcgccctcgcctgcaacaggtccccatcagccctgggctcctgggctttccagctcaggacctgcacggaggtagggggaaaagggactcccgtgcatgggtgtgcagactggttgctgcacaagagcgcttggcctacagtgtgtgtgtgtgataggggagaagtgagatggcgacttggggagggcaggggtgagcagggactgaaattcagtcttcaccacccaagtctcccactctaggccccaaaaggggtgtcttcttccaatttgcacaaagatactttatagttagcagcaaagctggacaacaaccccagcgaggtgccttttgccttcctcagaaaggccttgtgtcgggattatagtcatctccaccttctccccatgcaaagggctgagagggcccaggtgagaagctaagccaacttccccatcatgcagataaggaaacaggcccagagaagggaactcatgtgcccaaggccacacagcaaatgagtggtagaccccttggagagtggtttcctcccatccatggggtactcttaccaatatagccccgggctcgcacccagaacatctgtttgggctccattctctgcagctggctcaggggggatgggtttactggcttgatctcaatggggacctcctgagcagcaattcggttgagcgccaatgggtacctcttttggaggttagggtccctgaaagtaaagggaagagggtcggggtgagacccaggaagagagggagtcacatctgcattgcctcttctgactcccctcattcttccacagggacccctgatatccccaaagctcccctcccctgtggcaggcaggatagtgcagcgtttgaatcccttcttggccacttacgagccatgtggtctcgtgctaattagtaatctgagtctattttcccatctgcaaaatgtggataatgatagtaacctacctcataaccaacactgtgaagacaagatcatgaatatctaaccaacacatcatagtaataaggcataccctgtaatatgcactgttctaagcattgtacatacaatagtattcctcacaacaaccctgtgagataggtactattatcacccccatttcatcagtgaaataagcacagagtccaggtagcttgcttaaaaattggagagacaggatttggactcaggcaatctgggtccacagtatgattattttctatttttttagagacaaggtcgtcttctcacccaggctggagtacagtggcgcaatcagctcactgcagtctccaactcccaggctcaagccatcctcttgccttggcctcccgagtagctgggactagaggtgtacgccactgtgcctggctaacatttttattatttctttattttgagacggagtctagctctgtcacccaggcttgagtgcggtggtgcaatctcagctgactgcaacctccgcctcccaggttcaagtgattctcctgcctcagcctcccgagtagctgggattacaggcgcctgccaccatgcccagctaatttttgtatgtttagtagagatggggtttcactgtgttggccagggtggtctcgaattcctgacctcatgatccgcccgcctcagcctcccaaaatgctgggattatttttacttttttttgtagagatggggtctctttatgttgcccaggctggtctcaaaatcctggccttaagtgatcctcctacttcagcctcccaaagtgctgggattacaggagtgagctgctgtgcccagccacttcattattttaaacactcaagaaacaggctgcctgacttggcctgagttaccaaaccctacacagtagggaacattgcatccccccagggggaggagcccattccaaggaactcccttcaatacagtgacaaccacccatagtgctctgcacaggtcctgccattttcacccctatcctctggagtgctgttggacagaacctcctatgatgatggaatgcctatctgcacagcacactatggtagccactagccacatgtgactatggagcacctgaaatgtggctaatgcaactgaggaacagaattgttcattctactgactttggtttttttttgtttttttttttttaagacggaatctcgctctgttgcccagtcaggagtgcagtgactcaatcttgcttactgcaacctctgccccctgggtccaagcgactctcctgcctcagcctcctgagtagctgggattacaggcacgggccaccacgcctggctaatttttttgtgtgtgtatttttaatagagatgaggtttcaccatgttggccaggctggtctcaaactcctgaccttgggtgagccacccgccttggcctcccaaagtactgggattacaggcatgaaccactgcgcccggacctatttaattttaattaatgtaatatagccacgagtggctagagactaccttattaacagcacagatctaaattcaaggtcctttaacaatgtcttcctttcatttcagcaaacatttgtcgaactgcaaccacacaccaggccctgtgttttttctgttaatagtgatataactacaattcactgccattgtgctagttagtactagcacgctaagtgccttttctctcttatttaatcctcacagcagccttatgaggtaggaatatgattagcaccattttataatggtgagtactggctcagagtgggaaagcaacttgcccaaactcacacagctagtagggacaaaatctagaattgaatccaggcctttcaggttcccaaacccacatccatcccgtcatactctgctgcctccccagtatctaacacgagatagagacattctctccttatgatacagctaagaagtaggcagggcagaaatgagcattcccattttttagaagaagaaactagggccctggggagttgggcactgtcccacagcaggtgagcattcacagaggcacagccctggacagaatccatgtgtctatcctttgtctggacccagagctctttcccctgtaccagcatttttcaaacttgattaggtgtgatccaaataaatatattttaccaggtattcaaaatatctaacatgctccctggtggtctaatggttaggggaaaatacatatttgtatttttgtacatatgttttatatacataaaacatgtggccgggcacggtggctcacgcctgtaatcccagcactttgagagaccaaggcaggtcgatcacttgaggtcaggagttcaagaccagcctggtcaacatagcgaaacctggtctctactaaaaaaatacaaaaattagccaggcatggtggcatgtgcctgtaatcacagctgcttgggaggctgaggcacgggaattgcttgaacctgggaggcagaggttgcagtgagccgagatcatgccactgcactccagcctaggcaacagggcgagactctgtctcaaaacaaacaaacaaacaaaaacatgcactaatgcaaaggcagtgaccaaacataggccatagcgctgcagctctccagaggacactcactcctggtgtgcattaagtcctaagttgctggaccaggggcctgggggagagagggaatcacttagggggctggggaggtggtacttaacaagtggttacggaagtatttctatatacatatatatataaaatatatatatggttttttttcccaggtatggtggctcatgcctataatcccagcactttaggaggtcaaggtgggtggatcacctgagatcaagagtttgagaccagcctggatagcatggtgaaacgccatctctactaaaaatacaaaattagctgggcatggtagcaggtgcctgtaatcccagctacttgggaggctgaggcgggaggatcacttgagtctgggagtcagaggctgcagtgagccgagatggtgtcactgcactccagcctgggcaacaagagcaagactccatctcaaaaacaaacaaacatgtatatatataaacaacaacaaaatatatattctttttttcttttttcagacagagtcttgctcttgttgcccaggctggagcacagtaacacgatctcggctcactgcagcctccacctcccaggctcaagtgatccccccgcctcagcctcccaagtagctgggactacagacacatgccccgacacccggctaatttttgtattttttatagagacagggtttcaccatgttgcccaggctggtcttgaactcctgggctcaggtgatcctcccacttgggcttcccaaagtgttattataggtatgagcccccacacccagccccagccttatttttaaattagagatggagtcttgctatgttggcgaggctagtatccaactcctggtctcaagcaatcctcctgccttggcttcccaaagtgctgggattataggtatgcgccactgcacccggccaagcccttcattttataccatgacccagtacagacacacaccagaaacacacatgactaaacctcaagtttcacaaaaggattcttgcccttaatacatacatattattcactccagtatcttcttttctaatctgtattttaaaaatgctggtcaagacccactaaaggattctatgacccacaaacagatagcagctgcattttgaaaagtctgccatggagcctccaggtctctcaccttaaatactggtcaatgagggtctcacagtcaagcagctcttctggtggtggcacagtgggcatggagaactggtgctgcatggggctgggctgggcctgctggaaggaggcctggcagatgaagatgggcttcccatgttgcacggccttcacagagcgcaccgagaagctcgaccctgttcgtgtccgctccacttggtacagtactggcagcttcgggtcccctgcagtgggcacaaggacacagtgggtccacaggccctgtcatcatcacaacgcctgacaggcactctactactcatcttccattccatttcatctcagtgactactaactgaggtctgctaaggtccaggcccagggatacagagaccaccaggccctgtcatcaggcttctccctgtgcaggtggagcttttctctaacagcacaaacagcagagacattgacagattccttgcattcaaatcctggctccaccactcaccagccgtgtgacccttcacttctctgagcagtgtgcttatttgcaaactggggatcatcatggtgctcatcgcttacaggattttaatgataatgaaatgaatccgtagttgtaaagtgtttagaataatatctggcacatagtgagggctctatatgtgtttgttaaataaaattaatactccttgcttctatcttgctccatctatgcctgggatcttgtcatcagtccaaaaccattattctagatcagggagcagtaaatctagcctgcagcctgtttactgtttattctgttgttgttttcttttttgagaacaaacaaaggctatttattcagcgcttgttcttttttttgtttgtttgagatggagtcttgctctgtcacccaggctggagtacagtggtgtaatctcggctcactgcaacctccacctctcaggttcaagcgattcctgtgactcagcctcctgagtggggggggactacaggggtgcatgaccatacccagctaattttttttttttttttgagagacagtttcgctgggtcaccgaggctgaagtgcagtggcgctatctgggctcactgcaacctctgcctcccaggttcaagccatgctcatgcctcagcctcctaagtagctgggactacaggcgtgcgccgctacacccaacaaatttttgtattttttgtagagatggggtttcactgtgttgcccaggctggtctcaaactcctgacctcaactgatccacccaccttggcctcccaaagtgttgagattacaggcatgagccactgcgcccagccaatcagagcttgttgtagcaggaagtcaaccaccatcacttgcttttggcagagacttagaggcaggcaaaggaatgggaatgctctgtagtggaaaaaaaggcttcagggatgctcccattgcaggctgttggcatggggaagctgttggtgggctaactagaagcatgacacctggctgggcacggtggctcacacctgtaatcccaacactttgggaggctgaggcgggcagatcttctgagaccaggagttcaagaccagcctggccaacatggcaaaaccctgtctctactaaaaatacaaaaaattagccaggcctggtggcacacacctgtaatcctagctactcgggaggctgcagcaggagaattgcttgaagctgggaggtggaggctatggcaggagaactgcttgaacctgggaggtggaggctgcagtgagccgaaattgcaccactgcactccagcctggggaacaagagtgaaactctgtctcaaaaaagagtgggacatcctatgtgattggttaggagtacatatttggctttctccggttggtcctaagttggaagcaggggcaaaaattagggcagctatcagttattaatcaagtcctggctttggaggccaattgttacagtggtcattatttggcttgctggactggttggtaaagatagtggtctgacttcctacaagtctgacttgtggatagtaggctggcttcctgtgctggttgctgctattgtgcgtcagagttctgtttttctacatggtctagccattgtctgtttgtatattcagcctctcccaggcaagggccactgtcagtcacttcacccctgatgtatatggaagccatttggtccttcactgtcaggtgtctctgctccaaagcagagtggaagagcctaggcaacacagggagaccctgtttctacaaaaaataaaaaataaaaattagctggacatggtggcatgtgcctatagtcccagctaatcaagaggctgaggcggaaggatcacttgaggccaggagatcaaggctgcagtgagccatgactgcgtcactgtgctccagcctaggtgacagagcaagaccttgtctcaaaaacaacaagaccaccaccaccagagtagaaggcactggccagggataaggcagccaacaacaagcaggtgagggaagatttggagaggaagagaacttccctggtttccctgaagttctcactttgtctgagtcaggctgaccttgaggaaccctgacatctgggccatgagacatcttggggatgactttcaaccttcagatgaaagaagcaggtctagagaagtgttgcttccttcactctgatccaaatggggagtcaaccaggcaccagggctcaatcaacagcaataaacatcactgtctgaggtcaactggcttgctcagctctctgttatcaggcactgccaccagcagcacttctatcagagtgcgagctcctcaaggttaaaggcatttgagaagggcttaccaagagtccagacactagacaaagttacttgtgcagtctgctttcagacactgggaatgaagtcttcctccctaccaccaaacttggggggaaaaaacaaaaaaaaacctctaatccaatccttggtctgcaggtaagctaaagtgcagattcctgaggaggatcacagaaacttcagtactctggtctacctttcagtgtgaatgagttccagccctattcttgaaaattgttattggaacagagcaggtaggccctgaggcatattgaagggagttaatgattatggagtgatgcagggtgcctgacagcattggacaggagggtatgttttctcatgttggtctcacaataactatgtagagccactcttacccccattgtacagatgaggaaactgttgccttaaaatacaatttttttgtaataaagtcatgctaatttgtttacatattgtctatagttgctttcactggcaaaacctaaaatgtttactatctggccctttctagaatgtttgctgaccttgttctgaattcttcaagctctaaatttacctctgtagagaaaaactaaaaacaaaacaaaaacccaactaattcacattctttcctgggcttttagaaaaagaactgatttgataaatggccaaggaccaaccctccccctcccccataacatcttttatttttaaaatgtaattgaaacatctcttttttgttttgtttttttgagatggagtctcgatctgtcgcccaggtgggagtgcagtggcgcagttttagctcactgcgacctccagccgccgggttcaagcaattctccttgcctcagcctcagcctcagcctcccgagtagctgggatcacgggctaaggtcaccacgcccagctaattttcctttttttttttagatggagtcttgctctgtcacccaggctggagtacagtagcacgatctcagctcactgcaacctccacctccagggttcaagcgattctcctgactcagcctcctgagtagctaggactacaggtgtgcaccaccacacctggctaatttttgtgtgtgttttttttttttagtagagatggagtttcgccacattgtccaggctggtctcgaactcttgacctcagccgatctgcccgcctcggcctcccaaagtcctgggattacaggcataagccacatgcccagccaaaaaacagcattggttttaatatctgatatagctggcagagtcacaccacaaacagataagagctctcccctttttgccttgcagccaggaagctcagaactaaaccttgtatgaaactgcaacaatatggcttagccaaattttttgacatgatcgcttctcccaaatcccattactactggcctaatgtcctttgacttttaatattcccataataactaccaattattttagctatcttgcagcctttcaagacacaagcaagggcacaaataattatttttatttatttatttatttttgatggagacaagagtctcgctctgtcgcccaggctggagtacagtagcatgatctcagctcactgcaacctccgcctcctgagttcaagcaattctcctacctcagcctcctgagtagctgggactacaggcacatgccgccatgcctggctaatttttagtattttagtagagactgggtttcaccatgttgcccaggctggtctcgaactcctgagctcaggtgatccgcccgcctcggcttcccaaagtgctaggattacaggcatgagccaccacgcccggccaaataattatttattttgaaatggtggcttggacacagctcatttcacgctgctcctggatgaagactttccaagaaagaggatcttttccccagaacctgggatgggtaccctggcagctctctcattgtttagaattattgcccaagagcgaagcaaagaagcaggaaagagtttggcactcaaagacacataaaccaggttcaaatcctggctctgcctccttgggcactgtgggagctggttccaaacctcttcaggtcccagtttccttaggtaagaatgatggcaggaatgcctgccacccatgtttacttatgaagactaaacaagataatgcacacaactatgctctgtatcatgcaaattttaattattcccataagttaatcatcaaaaactaataatatttatggaaaactagattatgccaagccctgcactagatactttactggcaaagactcattgaattcttccatcacaggatgaagagattcagagttcaagtaatgcccccacccacacaaaagaaaacagccaggtatttcactaggctggaaggattacaatatcaaaaggctggtacttacaaacaaattaaagaaacaaagcacatatttactcccaactagcataaagataagaacctggctgagcccaaggtaagtattcaaatactttatagcagtgactgggggccgagaagaggggggccaatcaatactcctcagggatgaggagtaagagacacgggacagtatgaaaaagtgtatttaccattacagggataactttcatatttacaaaatgaagggggaaaccccatggttttcttaatacaaatcacatactgtaaaggtccacaaactcttctcagctggggatctacgcagaacacatgagggcatctgctctgggggtaacagggaaggaaagaaaacagtgagggttttttttgtttgttttttagcataggttttgcttttattttccttttatttatttttttgtagagacaaggtctcgatttattgccctggctggtcttgaattcctgggttccaacaattctccgcattggcctcccaatgtgcggggattataggcatgagccaccacacataggttttttgtttttgagacagagtctcgctctgttgcccaggctggagtgctcgcccaggctggagtgcagtggcacgatcttggctcactgcaagctccgccttccgggttcacaccattctcctgcctcagcctcccgagtagctgggactacaggcacccaccaccacacctggctaatttttttatatttttagtagagacggggtttcaccgtgttagctaggatggtcccgatctcctgacctcgtgatccgcccgccttggcctccaaagtgctgggattacaggcgtgagccaccgcgcccggcctcacacataggttttaagttacattatctgaccccagagctgtaagaagctgtagagatcatcccactaaaatacccttggtcccacccttctccattttacagctgaagtaaaccaaactgtagggcggggaggtaacctcacaaggctgcatggtaaattatggacaaaactgaagctaggccctacatctttggtttgtttttattgaccctatgctcagttgacaaaagaagccttagatcccttgactctcaggctggtgctctcttctccaacccaagctgccctacctccacacctctagcacagaggtcacagcacactgagaacctagcacagcgctccgcaccaggagctatgttaagaatggaagaacaaaagcccacaaggagcagttaagcaacaaagtcttgtgtcattatcagccagacatcaggtacccagtgagtcccagcaggtgtgaggtccaaggctcattgttagccccagacctcgttccaccctagacacctcttagggtggtagtgtccgccacccctccccttgtcttccagtctccctctcttcccttttgacctcagcccccaaggccagaaatggctgctgggccaccagggttgggttggggcaggaagtggggggtttacctgcccgaacaaagtagcagtgcagggagtgcacgtggacgtcttcactcacagacttggctgcagccaccagggcctggcccacgatctgaccaccaaacagcctcttggccggtacccagtaatgccttcctctgtagggagagggggaaagagggaaagacttgggaactgggccaaattctactaccctcactaagactctaatgcatgatctcttcaccatattggggtttaagatccttttgagaatatggtaaaagccataggtcctttccccaggcaaatatccttatgcataaaaatcctctgggccgggcgcagtggcttacatctgtaatcccagcactttgggaggccgaggcaggtggatcatttgagatcaggagttcaagagcagcctggccaacatggtgaaactccatctctactaaaaatacaaaaattagctggacgtggtggcatgcacctgtaatcccagctactcaggaggctgaggcaggagaatcacttgaacccaggaggcagaggttgaggtgagccaagatcgcaccactgcactccagcctgggtgacagagcaagactccatctcaaaaaataaaattaaataaatgtataaatgaataaataacaagagccctcagacatcaagtctaactccttcagtgtacagatgagaaaactgcagcttggccccagagatgaaaatgcttgcccagaatgtaggcccattggaagctgaataattatgtctctagcctcccacgtcccagctgtttggcattttctgtaacaatgagttatgaacagccctccatgacctggcaggtggctctcgcctgtaatcaatcccagcactttgggaagccgaggtgggaggatcgcctgagcccatgagttcaaaaccagcctgggctccaaagtggggcctcatgtctactaaaaataaaaaagttagctggatgtggtggcaagcgcttatggtcccagctaaacgggagactgaggcagaagggtcacttgggcccaggaggtcgaggttgcagtgagccatgttcgtgccactgcactccagcctggacaacagggccagatcttgtcttcaaaaacaaaaatcaaatagccctccaagaagttatttacaattccttaagtggaaggaagggagctcaaagtaagataacttccagtaaagccaggagaagccttggaggtcaaagctgttagaagccttgctgcagggggctgggcgcggtggctcatgcctgtaatcctagcactttggcagaggtgggcagattacaaggtcaggagttcgagaccagcctggccaacacggtgaaaccccgtctctactaaaagaagttaaaaaattagctgggctgtggcgcgcctgtatgtcccagctaatcaggaggctgaggcaggagaaatgcttgaacccgggaggcggaggttgcactgagccgagatcgcaccactgcactccagcctgggcaacagagcaagactccgcctcaaagaaagaaagaaacccttgctgcagtcaagaacttcagcgatgctgggaaagaaaaaaacatgcttaggcctcagaataagtaatgagaaaccagacccaccaaatggtactgggggcgggatattgtgagaagaaaaggatactgaagacacaaggagctgcggcgtcggttttaaggctgatccatcagctgtgtgcccttgggcaaatcactgccctctctgggctagctcccccgtgaaggcttagggcaggctgccgagcagggtctctcaggtcaccactatatttgctcagctgtgcagacctcgcagcgcggagaggaagggaggaagccagagcagagaggacagctctgttgggggcgagttctctcctaatcgtggcagagggtgcatcccacgcagagccatactagtcccggagccaggggccccgggcggcggcagtcaagatcaagtttctgccctaaaggaggggatgctgggcaggagctgccggctacctgaagagatcctcgtccagcggctcgaggttgagcacggtcgtgaccaagacgctacggaggtccccagggggatcgccgcggtcgccacagccctgcccatcttctggggcctgcggggacgacatctagttcaatgctgcaggccctgcacacccgctccgcggaagacgcggagacatacacagaacctgactcttccggcagattgccctagtaaccggaagtctcctgcagaccccgggaaggaggaatctaggttatgattggtcaggactcctgtcagtccgctggtggctgtggccctctttctctagcaattggagaaaatgaatgccaatctgcgaatcctgtgtgtgactggatatgtcgctgaggaggcggaacctcgggactggataatatggactgagtgtcatttcccctgtcagatagcaaatacacccccttcctcttgtaacccggtcaggcctagggttcctccctgagttccagaataggccacccagttggggcggacccttaaggcattctgggcccacgcctgcctataaaccctcatagtgtgacctttgacccctggtgtgatcttgggcccgggctgggaccagcccctagtgtgggttgtgggggcggccatggagctgggcagctgcttcaagacctatgaggacttcaaggagtgcttcagcgcctacaaaagggagaacaggtgctccttcattctcagggactgcgtctccgtccgcttccacaacctcaaccatggcacctccatccgcgaagacatcctgtaagggcgggcggggcggggcgggccaagagggtggggaggaggctggacctccggagggctgcctggaggaggaggggtgcataggcacgcattgggctgcgtggccattcattcaacaggcactcattgagcacctgctgtgtgccttgtgaagagagctaagcctccacggccattggtttttgaccacccactccactttcactccattcacaggcttttctggaatttataactgcagtttctcccattgttttgagcagctgcagcaacccaaatacaaagtatggctttcataaacggataaaaacaccttggcgataatttccttcatcagtctcctctttacaaaacagtcacatggtcgttggaatgttcgttcattcattcattcagtttttagttcttatatatttgttgaaacagggtctcactctgtcccccaggctggagtgcagtggcacaatcagctcactgagccttcaactgctgggctcaagcgatcctcccacctcagcctctcaagtagttggaactggaggtgcacgccaccatgcctggctaattatttgattttgtacagactgggtcttgttatgttggctaggctgttcccagactcctggactaagcgatctttcggcgtctcaaagtgttaggattacaggcatgagccactatgcctggtctattcattcattttgtaaatggtttttgagctccttatattaaccgttttcaaacactttccatgtgccaggcagtgttctctatgcatgctttaccctgcagggcttttttttcagaattatagataaatgttatttttttgcatttgacagatgagaagatttgacagatgagaagtcaggcttagaggttaagacaggagttgaaaactcaaatgccttcagggattaggtgaaacaacccaatgtaagaaagttttaactttgaattttactttaagaaaaagaatgatgaaatagcaaccaacaccaggtctttgtgctagggacaacagaagtgtgaaatgggccaaatggagagtagatgccatctaatcagctccagctgatggctgccatatgaaaataaagatctagtgttgccagaattttgggcaagagttgtcagaaatccacactttatgtggattttcccatttaaaaaaattgaatcagttcaaattttaactcagagcatgcgggccaactcagagttaaagcatatccgagtttgagacttggattgagatgctcaaccaaagctcctcaattagacagccaggctatattctttccactgttctgaagtccagtgctatgctgggtataggtgacataaagatgaataagtgttcaaactatccccagagaactaggataaacttgaactcaagcaaactggtgtgtgataaatgctttaaaaggaatgtggaaaaaaaaaaaaaaaaagaaatgtacggagaaagaaatgaatgacaaatgcctgggaggtgggggaagtcttcacactggaattgatggtttccctgggctgtgaatgaatgtagagtgctagagtagatctgtggttaattactgagtaccatggaggcatttgaccagaagttgctgtgcagaaggacctacaggagcaaagacaaagatacatgaaagaaggttggcatgttagagtaacagtgagggataccatgtttggcaggagatgaagtcatttgcagtctaagggtctttagggaccattgtgaggtgtttggaccttgtcctttatgggtaggaccttgctaagcaatgagaggaatacaaaaaaaaaaaaaaaaaaaaaaaaccacagttgcccgtaaacacccttcaggaagaccatctcaggtggctagcacaaggtgtggcccatagcaggcattaaataattattgaatgagtgagttatcaagtactaaccatgtgattcagggaaataggtgctgcgggaactcagaagagaaaaatcactgcgagctagagacgtaagagtgaaagggaggcttgagctgggcccccaaagatggagagctgtcagaaggtgtattggttttctgtttgccactctagtgaattaccacaagtttaatggtgcaaagcaacacaaatttattatcttagagttatttaggttagaagtcaggcacaggtcttagcaggctaaatcaagatgtctgcagggctgtatttctttctggagtccctgggtaagaatccatttcccgccgggtgcagtggctgatgcctgtaatcccagcactttgggaggccaaggtgggcagatcacttgaggtcagcagttcaagaccatcctggccaacatggtgaaaccccgtctctactaaaaatacaaaaattagctaggcgaggtggcacatgcccgtaatcccagctactcaggaggctgaggcagcagaattgcagccgggaggtggaggttgcagtgagccaagatcgtgccattgcactccagcctcggcaacagagcgagactccatctcaaaaaaaaaaaaaaaaaaaaaaaaagaatccttttcctttccttttccacctcctagaggctgcccaacacaccttgggtcatggcccccttcctccatcttcaaagccagcagtagcaggttgagtcatcacatcactctgaccttgcttctgtcatcacgtctctgactccctcttctgcctccctcttccacttttaaggatccttgtgattatattgggcccacccagataatcccagataatttccctattttgaagtcagctgatagccaccttaattctatctgcaaccttaattctcctttgccatgtaacctaacgtattcacagagtctaggattaggacaaggacatcttcaagggaccattctgcctgccacaagaagattaataacctggaggtaaaaatggtgtgagtcagtacagacgtaaacatgacgtgcttctattagaaaacagtgatgggctgggcacggtggctcacacttgtaatcctaatactttgggaggctaagacagggagattgcttgaaatgaagagtttgagaccagcccagactataatcctgggcaacaaaatgagatccccgtctccacaaaacaaaatttaaaattaggggccaggttgtggcagctcacacgtataattccagcactttggtaggctgaggcaggcagatggcttgaggccaggcattctagaccagcctgggcaacatgccaaaacctcatctgtacaaaaaatacaaaaagtagccaggcatagtggtgtgtgcctgtagtaccagctactctggaggctgcggcaggaggattgcttgatcccaggagtcagaggttgcagtgagctatgatcgcaccactgcacactacattttagcctgggcaacaacagagtaagatcctgtctctaaaaaaaaaaaaaaaagcaagcagtgatgtatgtttgcacgcacatacaaaagccatgaggagacctgcttagctagaaggaaggatttatgctggagcagcaggaaaggaaattggagggttgataagcaggttggtgggttgggatttgttttgtttgttttaggagacaaggtctcgctctattgcccaggctagagtacagtgggagggtcatagtttactgtaaccttgaaatcctggcctcaagtaatcttactacctcagcctcctaagtagctaggactacaggtatgcacccccatgccaggctaatttttttttttcaattttttgtgtagagacagggtcttgccatgttgcccaggctggtcttgaactcctaggctcaagctgtcctcctgcctcagcctcccaaagtgttgggattacagatatgaaccaccatgctggacctgtttttgtttttgaaggtgaacaattttaaaagtgtttttgggccaggcacaattcaatcacttgaacccaggaggcggaggttgcagtgagtcaagatcatgccactacactccagcctgggcgacacagcgagactctgtctcaaaataaataaataaaaagtgtttttgtgtttgagtggttaacataattaaaaatattttcaaaaagtacagaagggactaaaagggtcacctccactgcattagcttttggttttttttggttttttttttttttgagagatggagtttcgctctgtcgccaggctggagtgcagtggcgcgatcttggctccccgcaacctttgactccctggttcaagcgattctcctgcctcagcctcccaagtagctgagattacaggcacgcaccaccccacccagctaatttttgtatttttagtagagacagggtttcaccatgtttgcgaggaaggtctcaatctcctgacccggtgatccacccgcctcagcctcccctgctgggattacagatgtgagccaccgtgcccagtctgcattatcttttttatctatttatttatttcatttttatttatttacttacttacttacttattttgagatggagtcttgctctgtcacccaggctggagtgcagtggtgcaatcttggctcactgcaacctctgcctcccgggttcaagtgattctcctgtctcagcctcccaaggagctgagactacaggcatgcaccaccacgcctggctaattgttgtatttttagtagagacagggttttgccatgttggctaggctggtgttgaactcctgacctcaagttatacacccatctcagccttccaaagggctgcgattacagctgtgaggtgccacgcccagcctatgtatttatttatttttatttttgtagaggtgaggtctcactatgttgcccaaactgatattgaactcctaggctcaagtgatcctccctcctcggccttggaaagtgctaggattacaggcatgagccactgtgcctggcccactgcattattatatagaggcaatcagcgttaccttcctgagagatactgaggctgaacaaacatgtcttgtatatgcatttgcatctttttgttgttttaacacaagtggcagcatgctatttagacatagccttctgtacctgctgtacctggctcttctcacttaccaatatatcttggaaattatgccaccgtatgggcaatttgatttgactttcattgatttccttgtttttttttttgtttgtttgtttgtttttttgtttgttttttgcagttgttaactaaaaagttactccatgctggtgtctggagatacgttgttgaaaaatataaattgaatctctgctcttgtggagacaaatactaatctataatcacagaaataataatttccttaaagtggtagtagagctccaaaggaaaaacccagggtgccctgtggaggggtgatggtgacacttattctgattgtcaggaacagggtgggggtgctggttgacaccctaaaccaatgcaggctcttgctcagaaaaaactgtcagccctgagattttgcagatactttacaaagcacattcacctttattacctgacctggttctctgaataaccttgtcagaggcaaattttgctgttcccactaaattagttaatacatgtaaagtgcttacagcagtgccttgtagatggaaaatagtccacaaatattgtattgttttacagatggggagacagagccaggagaagtcaaacattaagagacaaatagtttagggccaggcgcagtggctcatgcctgtaatcccagcactttgggagaccagggcagacagatcacctgaggtcaggagttcgagaccagccaggccaacatggtgaaaccctttctctactaaaaataaaaaaattagccaggcatggtggtacgtgcctgtaatcccagctactcaggaggctgaggcaggagaatcactttaacccaggaagaggaggctgcagtgagctgagatggcaccactgcactccagcctgagcagcagagcgagactctgtctcaaaacaacagcataaataactgaaaattagacccagcctatttactgacagagctcttaattgttgtacttagccactgggctctaatagttttctaatgtcacttgtccatttttccctcaacaaacttgtggtaagaggctaagtgtttaccatgggccaggagtacaaagatgagctggagtacaaagatgaggaaattgtaggctccacccctgaggacaatagcggactgagatagcttaggaggcggtgaattcatgagcagcacaggtctttagcagaaacaagttgactgctggttgtgatgttataaaggacattcttggatcatttattgcaaactggctctgtgcagagctcactgtcttgggctttttgagtgatacgtgggtgtcttgggggactggagggttggtgggggaaatgtttttaggaggtaatttagtacatgtttctgcagccaaatacacatattactgggtggtcaggtgagatgatattaatacttatgtgaaaatgtagacataaagttccttgataagcaaagtaaagcaagtgaactaatttaaagaaaaccatttacagctggatgttgctcacgcctataatcccaacactttgggaggtcgaggcgggcggatcacttaaagtcgggagtttgagaccagcctgcccgacatggtgaaaccaactctactaaaaatacataaattagccaggcacggtgatgggcatctataatcccagctactcagggggctgaggcaggaggatcccttgaacccgagaggcggaggctgcagtgagctgagatcacgccactgcactccagcctgggtgacagagtgagactccatctcaaaaaaatttttgaaaataatggtgcagggccgggcgtggtggctcacgcctgtaatcccagcactttgggaggcccaggtgggtggatcatgaggtcaggagatcaagaccatcctggctaacacggagaaaccctgtctctactaaaaatacaaaaaatttatccaggcatgtagccggggcgcagtggctcacacctgtaatcccagcaatttgggaggccgaggcgggcggatcacttgaggtcaggagttcaagaccagcctggccaacatggcgaaaccccatctctactaaaaatacaaagaatagctgggtgtggtggcgcacacctgcaatcccagctacttgggaggctgaggcaggagaatcgcttgaacctgggaggcagaggttgcagtgagccaagatcatgtcattgcactccagcctaggcaacaagagcaaaactctgtctcaaaaaaaaaaaaaaaaaaattatccaggcctggtggcgggcgcctgtagtcccagctactcagaaggctgaggcaggagaatggcgtgaacccgggaggcggagcttgcagtgagccaagatcgtgccactgtactccagcctgggtgacagagtgagactccatttcaaaaaataaaaagaaaagaatagtgcaaatattatatgggtggctatggcagatgtaaaggtgattggcaattctttttctggaaaagctggcccaagggttaaaaggaagagctctggagtgaaagagactgcctttgcccttgaccttgggtaaaacttaacctcttcacatagtttcatcctttacaaaatgagaagggtgtggcaatgattaagaaaaattcagggctgggcgtggtggctcatgcttgtaatcccagcactttgagaggccgaggcgggcagatcacgaggtcaggagattgagaccatcctagctaacacggtgaaaccccatctctactaaaaatacaattagctgggcgtggtggcaggcgcctgtaatcccagctactccggagggtgaggcaggagaattgctggaacctgggaggcagaggttgcagtgagccgagatcacgccattgcacttcagcctggatgacagagtgagactctgtctcaaaaaaaaaaaaaaaagaaaaagaaaaaaaaaattcaggctagggggcatgcctgttatcccagcacttgggaggccaaagtgggaggattgcttgagcccaggagttcaagaccagcctggccaacatggtgaaaccgtctctactaaaaatacacaaattagtcgggtgtggtggtgggcacctataatcccagctactcagggggctgaggcaggaggatcatttgaacccggcagaggttgcagtgagctgagatctcaccactgcactccagtcttggtgacagagcgagactccatctcaaaaaataaaattgaaaataatagtgcaaatattatatgggtggctatggcagatgtaaaggtcattgggaattctttttctacaaaactggcctaacggttaaaaggaagagctctggagtaaaaaagacccccccttgcccttgaccttgggcaaaacttaacctcttgacacagtttcatcctttacaaaatgagaagggtgtggggatgattaaggaaattcaggctaggggcagtggctcatgcctgtaatcccagcacttgggagaccaaggtgggaggattgcttgagcccagaagttcaagaccggcctgggcaacatagcgagaccccatttctacaaaaaataaattaactggtcgtggtgacatgttcttgtggtcccagctactcaggaggctgaagccggaggatcacttgagcccaggagtttgaagctacagtgagccatgcttgcaccactgcactcctacctgagcaacagagaccctgtctcaaaaaaagagagaaagaagaaaaggaaaggaaaatgctcgtagcacctaaaacagtgctcagtaaatgtttgctgaagctgtaactatagtatgtagtagaaagtggtagttatttgaaagagagtcaaagatacgtgctctgggaattaccactaaatgaccaaaagttcacgtcaaaaaaataaaatcagatcaagttagaaatttttttttttttttttttttgagacagaatctcactcttgtcacccaggctggagtgcagtgacgctatctctgctcactgcaacctccgccttccgagttcaagcaattctcgtgcctcagcctcctgagtagctgggattacaggtgcccgtcaccacgcccagctaatttttgtagttttagtagagacagggtttcaccatgttgggcaggctggtctcgaactcctgacctcaagtgatccacccacctcagcctcccaaagttctgggattacaggtgtgagccaccgcacctggccagaaaaaattttattatgcacacaaaagaacagttggagattagtcagatgctccagtcactgtagtgagggcagtgttaataaagcctaaggaaggattttgaccttttttgtgattggctgttatacattaacaatctgtttacagccagtagagctgttcaaactgttttgtctatagttgattcctttaattttactgaattatgctgacaaggatgtaaagctttgtgttctgtttatgattgattagagctacatttcagggaatcaggatatcttaaattccggctatgtggctgtgggcagttggccttggagtatatctaaactgtggcctccactttcatttttcttgaaacattgctatcaactgggaagagtatgtgactttatgcccagtttcccctctcagatttttatgacggttgtttttctttttgttatgccatttgagggattgatgtttcttaaactatgaagtacttggctgtctctctccattgctgttcaggttaacagccaccatttgtaaacactttgttggagctcattccttctctgctaggaactttacaagaattgtctcaatcctaccacacctttggcaggacccttgttatcagagttttcattatccatgtatccatagttacaaggctatatagaaaagcaaaagtcatcacacaagaatcttgctaacaaactacttataaaattagtcactacttaaccatccctctgcttatccctgccagtcccattaacatgtttggtagtcaatttctggctgatgaagagatacattaagcatcaaggtaatgcaaatgtaaataaaactgactgtagactgaaatggcacatctcccaaaacttgtaggactaggcgaaatccctgcaagtgatgatagaaaaccttcagccttataccagttaacaaaggaagaagggaaatcaacaaagatgatgagatggtaaaaacttgaaaagtagaggatttgcctaggaaaaattaagcccttcggaaacttagtaaagctaaggaatattttggcaaaaccatcttttgtatgttgcaaaagtgagacaggaaatgaagtatagtgtttgggaattttttttttttgagatagagtcttgctctcctgtccaggccggagtgcagtggtgcgaccttggctcactgcagcctcagcctcctgagtagctgggattacaggcatgcgccaccacacccggctaatttttgtatttttagtagagacagggtttcaccatgttggccaggctggtcttgaactcctgacctcaggtgatccactcgcctcggtctcccaaagtgttgggattacaggcatgaaccactgcacctggcctagtgtttgggaaaactatactaggaaaagaatagttgctttaagtcattctttgattattctgagaattggcatatagctgccattataacctacttttgctaaatataataataataatcattatttttattttttgagacagggtcttgttttgtcaccccggctggagtgaagtggcgcaatctcggctcactgcaacctccacctccgggtgcaagcaattctcctgcctcagcctcttgagtagctaggattacaggcacaagccatcatgcccagctaatttttgtatttttagtagagacagggtttcaccatgttggtcaggctggtcttgaactcctgacctcaggtgatccacccgcctcggcctcccaaagtgctgggattacaggcgtcagccactgtgcccggccctgctaaatataatattaactttataattttagtctcattttccacccagatcttgtttatcactatctgggtggtagtgataaagttccacccagatcttgtttatcactattccctatgaaatgtttctgggtggccgggcgcagtggctcatgcctataatcctagcaatttgggaggccaagacaggtggattgcttgaggcccggagttcaaaaccagcctggccacatggtgaaaccctgtcactactaaaaatacaaaaaattagccaggcatgatggtgggcgcctgtaatcccagctactcgggaggctgaggcaggagaatcacttgaatctgggaggcaggggttgcagtgaggcgagatcatgccacggcactccagactgggcaataagagcaaaactccgtctcaaaagaaaaaaaaaagaaatgtgtctgggtatgtttttggctgcaattagctgaaaaccctgactcaaaatggcttattgcagatacttagaagcccagaggtgggcctccaaaggtcattgtctcagtggcctggactctgcatttttccactctgccatgttcaggtctcagctttgtccttaggaaggctccccatgtggcacaaatgcaggagtcacatccagaagaagaagcctttcttgccgggcgtggtggctcacacctgtaatcccagtgctttgggaggctgaggtgggtggatcacgaggtcaggagttcaagaccagcctggccaacatgatgaaacccccatctctactaaaactacaaaaattaaccaggcgtggtggcgggcacctgtaatcccagctactcgggaggctaagccaggagaatcgctggaacccaggaggcggaggttacagtgagtcgagatcttgccactgcactccagactgggcaacagggcaaaactccgtctcaagaaaaaaaaaaaaaaaaagaaaaggccaagcgtggtggctgtaatcctagcactttgggaggctaaggcaggcagatcacgaggtcaggagtttgagaccagcctgaccaacatggtaaaaccctgtctctactaaaaatacaaaaattagccgggcacggtagcatgcctgtagtcccagctactcgggaggctgaggcaggagaatcgcttgaacccgggaggcggaggttgcagtgagccaagaccgtgccagtgcattccaacctgggtgacagagggagactccgtctcaaaaaaaaaaaagccttccttggtttcctgccaatttcctgtcatgtttctttgtcccgaattgggccaatatccatgcccattcctaatacaattaccttaattgacttagattagccctgaagcatgtagtgatgtgggggaggaatgacaactgaagaaaatagaaaagaagggacaaaggttgttgagttggcaaccaacaattcctgttatagctttttaaattaattcactttaagtggtactgattattcatattgttatttccatgtatagagagagaagaaattggaggcttagaggaagtgaagtgacttgtccaaggtcacatagctaagtggaatttattttttttttttttacttttctgagacaaagtctcactctgtcgcccaggctggagtgcagtggcgtgatcttgactcactgcaacctctgcctcctgggttcaagtgattcttctgcctcagccacccgagtagctgagattacaggtgtgcaccagcatgcccggctaattttttgtatttttagtagagatggagtttctccatgttggccaggctggtcatgaactcttggcctcaagtgatccacctaccttggcctcccaaaatgctaggattacaggtgtgagccacggcgcccagctactggaagtcatgatgcaagctgttgtttgaatcatgaattccaaacttaatgagtgctaggttgaagttattttttttctgtttcccttaatcttctattgagatataacatgtattgaagcacagacatcttttgcaagaattcattgagcactatagttatattcatctgtacttactgtctccctggtaaaggcataaactcccttcaagatggggacatggttttatactttcctgaatctcctttagtgcttatatctaacagcacttaaccaggatctggagggggtcaaccagtcttgcttccttccaatctactctgtagatgtttgtgtttttctactgtaactatagaggtaaaggagccaatggtgtttccagtgtctggcacataataggtgctctatgaatgtcaaatgaatgactgaggcataaaaagttcttcctatgacataagtagtataataggaagatcactgggatagaattttcttagaagacgtggctcctagtcctagcactattactcttactgactataactttggacaagtcatttgtttaatttcaaacatttactgaattctgtgtaccaaatactgtacaagttgttcaaaaggctacagagtctctactctcaaagtctagtcaggggagagattacacaggagtgaaaccccatctctactaaaaaaaaaaaaaagaaagaaaaaaatagccaggcatggtggcaggcacctgtaatcccagctcttgggaggctgaggcagaagaattgcttgaacccaggaggcagaggttgcagtgagtcaagatcacactactgcactccagcctgggcaacagaacgaatatctgtctcaaagaaaaaaaaaaaaagaaaaaaaaagtatgtttagagatccttaaggaagttttgaacctatccaatatgttgggagtcaagatgaggagggtaaaagtaggaattcagagaaaggataaatattttgaaggaaggcagcataatggttaactagtcagactgcagacaaacaagcagtacaaatcccatgttcccaggtcttagctggaggattaaatcccagattctcatccttgagaacctctttaagcttgttttcccatctgtaaaatgtagatgataatagaatccttttcctactgtaaaatgatgcacattgggggcttcatgtagccagatatataataaatcctcaatacatgtagcagtggtaggggagaactaaaagacttgttaacatattggatgtaggtgagaaagaagaatcaaaaagaatatccaggttcccgccctgggaggggcagacataaatggagccaggaatggtacaaggagctttgtggtgggcactcactagtacctttctttggaatagctcaacaaatgttcactaagtacacataaagtcaatataacttgatgagctagagttaggctaagatgttgagttagcagaagagtagtacccaactaagggcttgaggaaggcttcctagaaaagataatgggtgcacgtagtcctgaaggatgagcaaggcttgcgaggagggaaggtaggaagggcattccagacaaagggacaaacatgcacaaaggtgagacagagcatggtgaacacacaaagttgtaggcattttgtctttctaggacacaaaaaacaaggtgatgaaaacaaggctggagagacaagcggagaccacaagtggtcacccctcactggcctcgctgtactactggactgctccagcccttcctggcccagagctagagatggcaccacccccgcactgtgcacacaataggtacagacactctcagccccaaacccctccagcctgttactgtgagactcacacatcctgttttcccaagcttgccccacagggtgagcaaactggaccagctggattagagtatttggaaaagtgcaggtggagtttctaggctatgccacgtcaggccagggggtgagatttttttcccttcccctggtctttgggctggggcactccctgaggagggaggggtgtgacccatcccacccattggtggtccatgatccattcatccagtacatcatccataagcatctgctgagccgggcgcagttgctcacgcctgtaatcccagcactttgggaggccgaggtgggcggatcatctgaggtcaggagttcaagaccagcctggccaacatggtgaaaccccgtctctactaaaaatacaaaatttgccgggcatggtggcgcatgcctgtaatcccagctactcgggaggctgacacaggagaatcgcttgaactcaggaggcagaggttgcagtgagtcgagatcgagccatcgcactccagcctgggcaacaagagtgaaacgccatctcaaaaaaaaaagcatctgctgaaggcacagtattgtgttagaggcttggactaccctgaggaataatagtcctgacacttgaggacatccccatccaattggaaaggcactggataaacatctaagaaaatgtcacaaggcataaaagctgtaataataatagctaacttgtatttagggtaaacaaaaggctgaatcaggctttggactaaatattttgcctgtggctcatttaatcttaataacaaccataagattatctcattttatgatgaggaaactgtatacagagaggtgattgacttgcctaaggttgaacagcttatgagtagtagagccagtattcaaatccagtcagcctccagtgtcccctctctttagtcattagatatagtgctacccagagaatctgctaagccttatagataaatgctatgaattcagaggcaggagcaattactgtggcttgggggcatccacaaagactttctaaggtggtgacacctgatttgggccttgaaactggttgaatagagataagaaaagaacagataatcaatttaactgccgttgtgttttgaatcatcactttaagcctagaatgacaaagctggaaaagaccctaaatatcatctagcccagtggttatcaaattttcttaggatgtggacatttttctttaaatgaaacatgagtagaagccagatgcagtggctcatgcctgtaatcccaactacttgggaggctaaggtgagaggattgctcaagcccagaagttggacaccaacctgggcaacggtgagaccttgtctcaaaaaagaaagaaagaggccgagggcggtggctcacgcctgtaatctcagcactttgggaggctgacgcgggtggatcacttgaggtcaggggttcgagaccagcctggccgacatggtgaaaccctgactctactgaaaatacaaaaattagtcaggtgcagtgctgcatgcctgtcatcccagctactcgagaggctgaggcaggagaatcgcttgaaccccagaggtggaggttgcagtgagctgagattacaccactacactccagcctgggtgacagagtgagactttaatttcaaaaagaaagatgagcagtaatcttgtctcttaaaaaggaggaccaaacattccctagccccaaaacattccctgaaaagttcagttgagaaccactgatctagtccaatgtcctgggatcctcgcttttatctttgctatctggagaaggaagagacagcggtagttcccaaaagacacaaacaatggggacattttaaacgggagtaaccagctaagcactctgctgctgctgcttgtctatttgccctcttgtcctgcctcagggtgaattgttggcagctacaaatggcaaccaagagagaatggagttggggcttagaagtgcggtagaggaatatgaagggggctggagttggagaggctcttaaagaaagagctgactatattgggactggagagttaatgtaaatctcttcttggttcatggggattttgttgttattgtttttttccccatgacacaactctcaggagatcctgagaacacgtgccctgatttggggggggttttaattttaactttttttttttttttttttttttgacagagtctcactctgtcacccaggctggagtgcggtggcgccatcttggctcactgcaagcaagctccgcctcccgggttcacgccattctcctgcctcagcctcccaagtagctgggactacaggcgcctgccaccacacccagctaattttttgtatttttagtagagacggggtttcactatgttagccagaatggtctcgatctcctgatctcgtgattcacccgcctcggcctcccaaagtggtgggattacaggcgtgagccactgtacctggccaaaatttttttttaattagagacagtctcttgctgtgttgcccaggctgatctcaagcagtcctcccaccttggcctcccaaagtgctgggattacaggcgtaagctatagcacccagccttccttctttccttaattctatttttttttttgtttgtttgtttatttgtttgcttttgagatggggtcttgcactgttgcctgggctggagtacaatagcgtgatctcggctccctgcaacctctgcctcccaggttcaagggattctcctgcctcagcctcccgagtagctgggattacaggtgcctgccaccatgcctggctaattttttgtatttttaacagagacagggtttcactatgttggccaggctagtctcaaactcctgaccttgtgatctgccctccttggcctcccaaagtgcggggattacaggcatgagccaccatgcccagccttccttaattctattaatatatgaatccttttcttttttttaaaaaaaagagatagactcttgatctgttgcttaggctggagtgcagtggcacaaatcagagctaactgcagcctcaaactcctgagttcaagcaatcctccagcctcagcctcccgagtagttgggaccacagttgggaaccactacacttggccctactacgggtttttcctgtttgtttgttttttgtttttttgtttttttgtttttttgttttgagacggaagtttgctctcgttgcccaggctggagtgcaatggcgcgatctcagctcactgcagcctccgcctcccgggttcaagcgattctcctgcctcagcctcccgagtagctgggactacaggcatgcactaccatgcccggctaattttgtatttttagtagagtcggggtttctccatgttggtagtcaggctggtcttcaactcctgacctctggtgatccgcccatctcggtctcccaaagtgctgggattacaggtgtgagccaccgcgcccagctgtttgtttttttgagatagggtctcactctgttgcccaggctggagtgcagtggcatgaacatggcttactgcagccttaacttcccaggctcaagcgatcctcccttctctgcctcctgaatagctgggaccacaggaatacaccaccacacctggctgatttttaaattttttgtagagccagggtctctccatgttgcccaggctggtctcagactcctgggctcaagtgatcctcccacctcagcctcccaaagtgctggggttataggcatgagccactgtacccagcccccttcagggtcttatctttataaggggtggggggtggtcagcacctttctcattgttacctctaccttccctaggtatgtgcaggtgaaatttgtctgcattcggacccaatcaaacaggaagagaacgcgggaggcagacatgtgcccagcgtacttgctcctaaggtacaacgagagactagatagactatttatcagtgaactaaacacacagcacatacatggtgactctaaagtggctagtcctggaggagacaccactggcaaatctcaaaagacaatgtgcctgcagagactccagcctgtgcagcccacaaccaaaaaagaccttgacactgccgagaagtccctggttgagccatcgttttgcctagataaggtacaagtgtcctcaaagccagagcaggaaggcatcactccttctgacctggccaagatagcaaaagtgatgaagaactttcttaaggtagatgagggttccatggcttccttcagtgtgggtgacagccagcacctggaccggctcagcttccagagcagtaagatgaccgacctgttcatccgcttcccagagaatctcttgctacaccgggtggagaacacccagggccacatcctctatgctttcttggtggagaacaaggaacgagaaagtcgagtggtgcactttgctgtgctcaaggcggagacagtcacctctgtggccaagatgctgagcatcttcacagagttcaactccgattggcccaaggtcaaggtggtctttgtggacccttcattccattaccgggctatcctgcaggagatctttcctgctgcccgcatcctcctttccatctaccacacaacccgactcttggagaagaagttgcatcgtagttcagcaaatccatcctttaaaaggctcatgaaggaagccctgcgggaggccgtgtttgtcacttctgaagccagcctgaaaaatctctgccagatgtcccaggccgtactggatgaggatctcttcaacttcctgcaggcccactggttcacctgtgaactgctgtggtacatgcatgttaggaagggcctgcttgcgtgtaacacctacatggacagcctagacattgtcaccagcaaggtgtcaagcctctttcgggaacagcagtcgctgctggactgcatcctctgctttgtggattacatagacttctttaataccaaaggcttgaagaacttgcccacacctcctcccaaattaaagagagctcggccggcaagcatgccactgaagtccaagaaggcttttggaatctgtggagagagccttaccagcctccctgcagaagagaccaagccagacgcacagcaggtacaggtacagcagcagtcacaagtgccgccctcgcaggttggcatgctggacaccttgcaccagagtggctctgaactagcctacaagctgtgccacaatgagtgggaggtggtacagaactccacccacctggtggacatggctggctcttcagtggacgttcagctgctagaggactctcaccaggttagcaaagatggctgtagctgcagctgttcctttcaacaatggtaccacctgccatgccgacacattttggctctgctgcacaccagccagcagccggttggtgaagccatggtgtgccgccggtggcagaagaagtaccagtacctccttgggcccaatggggagctccaggatcgtggtatggtcccaaacacaggccagcctgagaagcaaggacggaacgacatgattcaggacctaagcagggagttagcaaacctgctcatgcagaccgaggggccagagctggaggaacgctactccaccctgcgcaagattgtggatatctgggctggcccctcccagccatctgagctctttcagcagccaggagactttaaggacgtgggccgcctccctttcctctggggaaagcaagaagaaggggagggattccctcctgctacagctgtgatgcattattgaagcactttagctgaagcattggaccacaaacacttctccttggaagtgtgagagtttaaagtgggcaggacatactagggtttagcattttagccaatgtcttcctaggtggggctaggaatattgttacagtagagaggaagggaactccactgtgtgacagtcctttcaatctgccccttttcagccctacttttggcattccttgggagcctcagttgttgttcaaggccaaagttatctccgtgctgcaaggtcaccctcttcctcccccagcccctgagatcagatcttatttgctctgcaaagatgaatccctgcctcaggttagggtgagacaaaatcggtctggtaaaagggcctgttttcagggacaaagggaatgaggatgatctttggctgttgctgctctttatgaagaatcttatttgtaactttttattcatattaaagttgtttttaataaaattaaacaagggaaatgtgttctgcttgatcagggaaggaagaggaattgcatagcaataggactcgactttacagttaggaagtggctgctctaggtggatttattaattttaaagaaaattgaggccaggcgcagtggctcacactcataatcccagcactttgggatgtcgaggcgggtggatggatcatctgaggtcaggagttcgagaccagcctggccaacatggcgaaaccctgttctactaaaaatacaaacattagccaggcgtggtggcgcacctgtaatcccagcttcttgggaggctgaggcaggagaatcgcttgaacccaggaggcggaggttgcagtgagcctagatcgtgccaccgcactccagcctgggtgacagagtgagactctatctcaagcaaaaaacaacaacaaaaaaaaaagaaaagaaaattaagtattagcaacctaatggggttgtggagccaaatagaacctgatgcctcacattcaaggatttggcaatctgcgtcttaatttgcctccttcctacaactaagccttcaaggttgatttcaggtttccttatattctagcgggaagaggccaaatagactggagggtgtgggggaaaaacctgaatcttagacttgactgccagcaacttgctggggaactgtgggcaatttctttgacctcagtttcctctgtaaaaattagcatgttggcctgttctaatcccagatttcccctctaggtttacataagcacctttttgttttttgttttgagatggagtttcgctcttgttgcttgttgcccaggctagagtgcaatggcagaatctcggctcactgcaacctctgcctactgggttcaagcgattctgcctcagcctcttgagtagctgggattataagcatgtgccaccacgcctgcctaattttttgtatttagagatggggtttcaccatgttggtcgggctggtcttgaactcccgatctcaggcaatccacctgcctcagcctctcaaagtgctgggattaaagggatgacctactgcacccagcccaataacattttcgatgcgtaagtaccaacactgatttgatgttgctagttggtaatcttaatcctccaaggcctggtaaacacccagttttctaagtctgccatcttcaagggaactgaggacaagagaccagttagtaggcccttgcactactgtagtaggaccctaaataagtcatggcatcattctgtagaatactggagggggttgggctagagaatgccaagttttggcttgtttaaggggatctggatttcctcagctctaaaagttgggctcctgatccccgaaggaggagtagaatttgagacctggaactcagtttccccataaggtagaatatgcgttatgactatatatgcactgtttcctaaattccaggggctttagagtttcacacacacacacacaacaaaacaaaacccgcggtggctcacgcctgtaatcccagcactttgggaggctgaggtgggcgaatcacgaggccaggagttcgagaccagcctggccaacagggtgaaaccccgtctctactaaaaatacaaaaaattaactgggcgtggtggcgggtgcctgtaatcccagctactcaggaggctgaggcaggagaatcatcgcttgaacctgggaggcggaggttgctgtgagtcgagatcttgccactgcactccatcccaggcgacagtgcgagactccatctcaaaaaaagaaaaagaaaaaatatatatataactgctatttattttccttttcattttctgcttttgagggagtttccatagtaacgtgtccttccagtcgcctagcctgaagggaagccccggagctccagcttcaaggctcagctctcccagatgcaagtatctttacctccagccagctccttgtaaccctggcaacacggcccgcccgcgaatcgtcacgctacgattggtccgtggtgctaaagcctgaaagcgaattcctcagacattggtccgagtcactgcgatgctgacgctgtggttggtgagtttggatgtcagtcagagtcggaggcagggtcaaatagggagaaatggcgacggagcctggctgtgggtgagtgcttcctgaaggggtgaaagtgtgagacagcggatcaccgcagttagccgtcacacagctcccaaagggatgggagggaggttttcttctcatccggctccagctggactctgggaatgtcagacatccacatctcccacccaggttagaggtgagaggtcaaaggccgtattccctctgttggtttttggaccccaggtactgtggacagcagtcaggatcccgaaccaaagactcaactttcagctacttacagagtaatggtgggcaagtcacttagcttctttgagccttagtttatcatctgtaaaatgaggacagtaactcggtctggggccaaatagaggaaacaatggaatagagtattgctgctaaaagagggatatagtagaggcaggagaagctatgcacatttgttagccatattttatggtggaagggattgaggctcagagagggtcattgacttgcccaagataacacagcaagtttggagcaattgcagttctcttatacataccaggaccaaaggaaagaatggatgccaatcagtcatttataaatataaaatcgtatttttattttattttattttttgagacagagtttcactctgtcacccagagctggagtgcagtggcgcaatctcggctcactgcaacctcagcctcctgggttcaagcaggtctcctgcctcagcctcccgagtagctgagactacaggcatgggccaccatacccggctaattctttttgtatttttagtagagacgggttttcaccatgttggccaggctggtctcgaactcccaacctcaagttatctgcccaccttggcctcccaaagtactgggattacaggtgtgagccactgcacctggctagaatgctatttttttaaaaggccatatgcagctctggccatacctatttaaatcccctggaaccatatctttccatagctaacttcttatcatttagatttcagctccaatgtcatccttctcccctgagaggccttccattaccactttaactaaagtatccctcccttccccagcttactctctgacatgttactcaggtttatggtctttgtaagcttcattattggatatatatttgcttatttgtttacatgtttattgtgtatcttcccctagaacagtgctgacatatagtaagtgttcaacaaatattgtgtggatgaataattgaagagccaggtccctgctgtctccttaaacctctgttactctccataggcccatctttggaaaaaagatctgggaatgattgtctagcctccagcctcaacttacttgatgcttgagagactcaaagccccgtggtcagctgccctgcaaagaaagtattttgaccttggcatttggacagctcccatctctcccatggccctgacaatgctgaatgggctcctgattaaggactcaagcccacctatgctgctgcaccaggttaacaagactgcccagttagataccttcaactaccagagctgctttatgcaaagtgtctttgaccatttccctgagatcttatttatccaccggacctataacccaaggggtaaggtcttatataccttcctggtggatggacctcgggtgcagctggagggtcatcttgcccgagcagtctactttgccatccctgccaaggaggacactgaaggcctggcccagatgttccaagtattcaagaagtttaatccagcatgggagagagtctgtaccatcctggtggatcctcatttccttccactgcctatcctagctatggagttccccacagctgaggtccttctctcagccttccacatttgtaagttcctccaggccaagttctatcagctgtcccttgaacggcccgtggaaaggctgctcctgacctccctgcagagcacaatgtgctcagccacagcaggcaacctgagaaagttgtatacactcctgagcaactgcatccctccagccaagctgcccgagcttcactcacactggctgctcaacgaccgcatctggctggctcaccgctggagaagccgagctgagagcagccactacttccagagcctcgaggtcaccacccacatcctcagccagttctttggtaccaccccatctgagaaacaaggtatggcttctctgttccgttacatgcagcagaactctgcagacaaggcaaacttcaaccagggcctgtgtgcccagaacaatcatgctccctcagacaccatccccgaaagccccaaactggagcagctggtagaatcccacatccagcactccctcaatgccatctgcacagggccagcagcccaactgtgcctgggcgagcttgctgtggtccagaaatccacacacctcattggctctggctcagaaaagatgaacatacagatcctggaagatacccataaggtgcagccccagccccctgccagctgcagctgctactttaaccaggccttccacctgccctgccgccacatcctagccatgctcagtgcccgccgccaggtgctccagcccgacatgctgccggctcagtggacggcaggctgtgctaccagtctagacagcatcctgggcagcaagtggagtgagaccctggataagcacctggcagtgactcacctcaccgaggaggtgggtcagctgttgcagcactgcaccaaggaggagtttgagcggaggtatagcaccctgcgggaactggccgacagctggattgggccttatgagcaggtccaactctgattattctcgatgcccagagatgctcatgcacctgtgcacactcacatccacccatacacacacacacacacacacacacacacacacacacactcccttacactgttgtacttccgtgggccctccttccagaacaaggacaacaaggacaaggttgaagggtcttctcatctaccatggcctgctacctagcatgtgtctagctcaatgagacaggagtcagcaaatcttaatctgtttagtttactcaggtggccacatacagtctctgttgtatattcttggttttgttttaatattttttttctttttttttttttttttttttttgagaaggagtctgtctccgtcacccaggctggagtgcagtggcgcaatctctgctcactgcaagctccacctcctgggttcacaccattctcctgcctcagcctcccgagtatctgggactacaggcgcccgccacaatgccgggctaattttttgtatttttagtagagacggggtttcaccgtgttagccaggatggtctcgatctcctgacttcgtgatctgcccgcctcggcctcccaaagtgctgggattacaggcgtgagccatcgcacccggcctgttttaacattttcataaggtaaaaacctttcttagctcaaaggtctttaaaaaagcaggcaatccagctgggcatggtggctcacgcctgtaatcccagcattttgggaggctgaggtggacagatgacttgaggtcaggagttcaagaccagcctggccaacatagtgaaaccctgtctctactaaaaatacacaaattagccaggtgtggtggcgggggccctgtaatcccagctactcgggaggctgaggcaggagaatcgcttgaacctgggaggcagaggttgcagtaggccaagatcctgctgccactgcactccagcctgggagggtgagactccatctaaaaaaaataaaataaatggcaacccctggtctaagataagagataaaacatcaggtggtgaggttgaggtttggggcttggtagcagttgccccagtcatgagatgactcacttaacccgtctcctttaagtgagctgggctgggaggcttcctacaggggaagaggcccctctggggagctgactcagccaggctccctgaacttttttccttgtcccatcctggggtcaataaaactgaatgttgcatattctagcacttgtctagttttttttttgttccatagaaggcagtttagggtatatcatggagagaatagactttagagtgttatacaacatgtgaatcctggttggttccttccctgcttgatttttgtgcctggttctgccttttactagctatgagacttattaggataagttacccctctaaacctcaacctgattatctgtaaaaatggggatctccacagggtatgttcacagagcaggcatacctagtgggtgctcaattaagtattaattttccttccttgcctatggtcctatgacctgccttcaacatgctgggaaatttaaggcaagaggagaattcaaatacctaggacttaatataagaaattctggccaggcatggtggctcacacctgtaatcccagcactttgggaggccgaggcaggcggatcacctgaggtcgggagtttgagaccagcctgaccaacatggtgaaaccgtgtctctactaaaaatacaaaaattagccgggcgtagtggcaggcacctgtaatcccagctattcgggaagctgaggcaggagaatcacttgaacctgggagacggaggttgcagtgagccaagatcatgccattgcactccagcctaggtgacagagcaagactctgtctaaaagataaaaattaaaaaaaaaaaattctgggtaggccaggtacggcgtctcacgcctctaatcccaacaccttgggaggccaaaacaggcagattggagcagcctgggcaacatggcaaaaccccttctgtacaaaaaatacaaaaattagctggatgtagcacgtgcctgtagtcccagctactcaggaaggctgaggtaggaagatcacttgagcccaggaggttgaggctgcagtgagctgtgattgtgccactgcactccagcattggtgacacagtgagaccctatctcaaaaaaaaaaaaaattctgatcaagtcttcaaaacaacataaaagcagccttaactctccaagcaggggcccctacctcagataatttccattgtatctacctgacaaaacctatctcctgtcttagtggtatctggagaaactttagggtctggaagtccctgatgaaggactggaatttgtcagaatggctcaaccaccagctctatccccatccctgccataggccctcctcccaaccctgtctgcccaagaaccatacggagaaaccaccctacatatctggtgctatttcatccatctacaagcaggagccaggaggctggccccttttagatctcactaggggcatcttcccagaggctgtgtgggcatgtgcctgctcccaccgcgccccctccacagcaccctctggctccggatgggccatcatgaaagcttgagcggcccagatcaggtcctcttcccgaactcctgggacgggcacggtggggatgccagcgatcatcatggcgagggtgaggatgcagatatcaggctgggagctggcctccttccccactgcctcagagggtaccggtagaacccgtggtgacagcccacacagcatcaggggcctaggcctgctggggccacccaggtcaggggctctgcttctggagtagccattgtcccagcccaagctctccagctgcctcacatgcgggaatttgtggcagtttcggctgtattccttccgtagtgtctcccagctagtccccccagggcagcccctggcttgtggcattgccagggctgggccccaggcctgggcagcaggtgccacctgctcagctttctggctcagtgggcctgttccaccagaggccaccaccactggctctacaggactacagaggccaagggacaagcctggagaagcagccccacctgcagagacaggaatgaaatggaacgttattctcagttctttgaggagggggccctgaggggcagggcatgggagcagagcttgggggcgtaactaagaccagccccagcggactgtctagaggttgggaactaggtgttactcatatccacactcccagtccccaacacggagtaggtgatggagaagcgtttgttgaattaatgaatagtgagcaagcgggtagttattgattggcaaggatgtttggaatggcttttcttctaaaagaattgattctagggccagcccccaaatgcccagcagaaccgccacctccccagagccagaaagcaacttctcaggggaagctgccgcactccctccaattgcaggtgccccccgctcaccttggccggaaggcagaggacctggatgagtttgtggagtcctgaagtaggacatggcttccccaaagccccggtttgtgagggaatagtgatctgccgcctgtcctcccttcttcacccttctagaatgtcacctcatagaccctccccttcacacttggaatccactttacagcgttgacctattcattctagaacctggacatgacaataggatgaggttaaaagagcaccagaccaggagctgggtgttctaggttcttgccctaaccttgaacgagtcacccagatagttttgttccttgatatccttatctgtaaagtgtgtctgatgactgcccactacctcattaggagttttgaggatgaaatgagatcatttgtatggaagcagatgaccagagatggaaacacaggagccaagtgcttcgtgccttgtagagtaagacttcgggtcagacccagtattggtatttttctttttctttttttgagacagagtctcactttgtcgccatgactggaaggctggagtgcaggagcaagacctcagctcactgcaacctctgcctcctgggttcatgcaattctcctgcctcagcctcccgagtagctgggactacaggaacctgccaccacacctggctaacttttgtatttttagtagagacagggtttcaccatgttggccaggctggtctcaaactcctgacctcaagtgatctgcccacctcggcctcccaaagtgctgggattacaggccaggtattggtatttttcaaaattcctcaagtgattataatatatgacaaagttggaaccttttttctagggacatacttctcaaccctggctgtacatgagaatctcttgagaagcttttacaaaacacaatgtctaggcctaatttcccaacaaatcaaatacgaatccctagggatgggatgtgggacaccagcactctttacatatcctaagatgactctaacaagcagccagcctagggacccctgctcttttgctccgacctgctgacctgcagtgattctaaacgaagtgactctcataggctgtaggggcaaggagaccttccagtgatcaagatgtcagcatcggctgtttatttctggtcttggctggcagcaatgtggccaacttcggaccagccagccacaggtctggggctccaggatgcagctgtgctctggtgcactgtgggtcttcactcatacttgcagaaatccttaagttctttgggcaggtggagcccatcaatggccagccggtgcaccatgctcctttgtatcactaggcggcacagagtctgcagggatggcactgtgggaagaagactgtgaaaggcaaactgaactggagggtgggtctgaggccaagatccagaaggtctaggtcatggtccccactttgtcattaaatgtgggcaagtccttactgctctctgggcccagcctgcttcatggggctgagagaagcacctcttcctgagagctgccacaaagctgcagccctgtttatatcataacacttagcacaatcccttccccattcacttagcagcttctgggggcaggggtagtgtctgatttgcctgtgcaactgaagcctccagcacaggcctggcacaaagagggttctggtgcattgagttcatgaaatgtgatgagaggtataactgcaatgcttaccagggctataatgaatcatactcagcattaagaagctctcagtctggggtttgttatgcctcgaagccaatagccaatatgcccaagtctatgagcatgtttctttcttttctttctttttttttttttatttaaagagagagggtcttgctctgtcacccaggctgaagtgcagtgctcagtgaactgcagccttcaattcttgggctcaagcgatcctcctgccttagcctcccaaatagctgggactacaggcatgcaccaccatgcccagataattatttaattttttgtacagatggggtctcactttgttgcccaggcttgagctagctagcttgcttgcttgcttgctttctctctcttcctctctctctctctttcttttttttttcagagtcttgctctgttgcctaggctggagtgcactggtgagatctcggctcattgcaacctccacctctcgggttcaagtgactctcctgcctcagccttctgaatagctgggattattggcacatgccaccacacccagctactttttgtatttttagtagagacaggctttcaccatgttggccaggctggtctcgaactcctggcctcaagtgatctgcctgcctccccctcccaaagtgctgggattacaggtgtgagccactgtgcccggccaagcatgtttctaagaaaagggcaaacaattctcaaagaggcccctaatatctaaaattggtttagaatccctgccctaggtgaatacaggaaacactatcaaaactaaaagggaacttgtagggcatcttaatcaatcaaccaagataggtaccaaggcccaaaaccatgtagaggcttgtgcaagatcacaagcagaggtgcaatttgaagctagattctcccactcttaaactagtgccggacagacgaaggcctagcacatgggctacggagccctagtagattccagtccccacactgagccaggaggggtcgctgcccagggatacctacagccatactcgagctggacaaggcgcacgctctttgtggaagcaaacacgtccaccaccgcgtagaggggctgcgcagctggcagtccccgggcgctcgggcccatgtcctcgccgttgatgatgatgtgcatgtcggccgtgccatcggggcgcgggcaaaagaggacacccaggcggctacggcgcgcggtcggaggcagcacgttcagctcatagagctggtccaagagatggctgtagagccctggccggctgcggcccaccaggcggtcccggggaatgcgaaactgctcaatgcgcagatatggttccacgaggagggttggaggtcggctgggggccgctgcctccgcctccgggcggccctcccggggcacgcggttgtggtggcgcgtgatggcgaagacccaggtgtggcccaggttgaccagatcgggcagagaaaactcgggaacgggggccagactggcggggtccagcgcggtcagaccgagacgcagatgtccgcaccagcccagctctttctcctcgatctcgaccaggaagacctggcccggggccagcggctcgcggctgaagcacacgccgtgggcgaagctctccacgcgtgtggcccgcgtcccagaggggtccacgcggatgttggcaccgtgcacccgatggaagcgggtgggagggggctccgggcgctcgagtccccagagtgcacccgaatccacgggctcggaggcagcagccatctctcggccatagggcaggccagctggcgccgggggctattttgggcggcgggcaatgatggtgaccgcaaggcgaccttgtaaggcatttcccccctgactcccttccccgagcctctgcccgggggtcctagcgccgctttctcagccatcccgcctacaacttagccgtccacaacaggatcatctgatcgcgtgcgcccgggctacgatctgcgaggcccgcggaccttgacccggcattgaccgccaccgccccccaggtccgtagggaccaaagaaggggcgggaggaagactgtcacgtggcgccggagttcacgtgactcgtacacatgacttccagtccccgggcgcctcctggagagcaaggacgcgggggagcagaggtgagctggcaccggaggctggaggggatccccgagcccgggatcggtgcgcggcagaggaggctcgcgggtgggagctggcgctggggccggggcttccctcgcggaggcgccgccagcaactccccgggggctgctgcacggaagcgctgaggagcgagtcaacagcccctctgctgcctcccgtagatgatccgagccgcgccgccgccgctgttcctgctgctgctgctgctgctgctgctagtgtcctgggcgtcccgaggcgaggcagcccccgaccaggacgagatccagcgcctccccgggctggccaagcagccgtctttccgccagtactccggctacctcaaaggctccggctccaagcacctccactactggtctgccgccctgccttctgggcgggattgggagaagagatgacggatgagggatggggggtagttctgcagacccctgaggatgcctgggagccgggagggctggaaagggcccctccaactgcgccaaccctgccctgacccccctcccaggtttgtggagtcccagaaggatcccgagaacagccctgtggtgctttggctcaatgggggtcccggctgcagctcactagatgggctcctcacagagcatggccccttcctggtgagtggacagcagggggaaagcacagttcccaaagtaaaaggctggggaaagcgagagaggggctttgtgattttccaaaaagtttccttccttctaagcctcgggattttcctctatgccattggctttgctgcctgtacctctcagaggttttacccacatgtaaagtgcctctcatggtggccctttccctccacccagctggcccttgggacttactcagccatctctttcctcctcaggtccagccagatggtgtcaccctggagtacaacccctattcttggaatctggtatagctggagctgtgggtgtgtctgggcacttggatggggtggcatttagctaatttttccctcccctctagattgccaatgtgttatacctggagtccccagctggggtgggcttctcctactccgatgacaagttttatgcaactaatgacactgaggtgagtctggtgcctgcccatctgccccaggctccccggtcctccatccatggcatgatgctgggagagagagcatggccttggagtctacttttcgctctgtcatatgctattgtggtatggtggccagtcacttcctcttgcacaaatagggtgggttaatgtcattatctctgaagttctttccagttcaaataccaaagcttcctgattccctctgtcttgctctgccatccccaggtcgcccagagcaattttgaggcccttcaagatttcttccgcctctttccggagtacaagaacaacaaacttttcctgaccggggagagctatgctggcatctacatccccaccctggccgtgctggtcatgcaggatcccagcatgaaccttcaggtgcagggtagctgcaggagggaagggaggtagcttgaggctgtggccttacagttagcaaggtcagactgactggtcaatgtccccatccaacccagcttcctgcataacctccccaccaccggctgccctaggtctgtctgtgtgcctcccacacaggaaactcacctgtcaggctgccagctctgtgttttgcattgagtggcctctcatacccaccggcctacataaaccaccctgggtttcagcttccggattgctgaaggtctgggtggtagggtgagggaggctcttcctttttgccctccacatgagctgagcaccctgggtgtttcacaggggctggctgtgggcaatggactctcctcctatgagcagaatgacaactccctggtctactttgcctactaccatggccttctggggaacaggtatgggatagggcagttgggcaatctctggggtgaggcaggtcacatgatctcaggtctgtcctccaggcacatgatatgacaggcccagcccaggtttatgagcagcaggtgggttgcagaaagaacctagtgctgaaaggccaaagaatagagatcagtttttctttctttcttttttttttttttgagacagattcttactttgtcacccaggctggagtgcagtggcacgatcttagctcactgcaacctccacctcccaggttcaagcaattctcatgcctcagactcccaggcagctgggactacaggcgcgtaccaccacacctgcctaattttttgtatttttagtagagatggggttttgctgtgttggccaggctggacttgaactcctggcctcaaatgatcttcccaaagtgctgggattacaggcatgagctacagcgcccagccagaaatcagattttaaaggaactaaggaggcctgtctgtatgaccctggggcacctctttgggagctagcttagatgacatacagaccacaccctgtgatatctttcccagtctcctagggtcagggaggttggtgggaggtggggggtatgctcgcctcctctgccttcctcttcccaccagcagctgatgcgcttttcactctcatctcctacaggctttggtcttctctccagacccactgctgctctcaaaacaagtgtaacttctatgacaacaaagacctggaatgcgtgaccaatgtgaggttctgccatcactttgcatgagctctcccatccctaatcctgagaacaggaccacattccctccttggggactccttgttctccgtccctcattgctttcttgcacctttaagcaatttagtgttctctgggacatgtgtctaagtgtgtattcccaccaccacctcctatggtggcaaatcccataacctccgtgaggagaaaggacttcttcacatttatcaaacacctgcaacgtggcaggcactgtgctgaactgtgtctatgtagattatttaagcttcaagattccccctcaaatgagatcatactacccacattttccagataaggaaactgagggctatgaattttgaaatcactgtctgaagtcacagtgttgggaggcagtgatgctaggatttggacccaggtctgggaagattcctgccactgagcctcagtttccctacctgtgaaaaaaagtgggtgaagaggtgaaatccaagagcagtaaatcttgggacaacttggtggggtcgtggagaggctggggatctgtaaagcatggtggcttggtgtatcattgcagcttcaggaagtggcccgcatcgtgggcaactctggcctcaacatctacaatctctatgccccgtgtgctggaggggtgcccagccattttaggtaggtgctgctgggtgcccctggagccaaccccagccccatctggaggctccacacccattcccccacctcacattgcaggtatgagaaggacactgttgtggtccaggatttgggcaacatcttcactcgcctgccactcaagcggatgtggcatcaggtgtgcgagggcgtgggcttcctcctggtgaggtgggggcagggggaggggcagggaagcagaggccctgacccactgtctgtgccttccaggcactgctgcgctcaggggataaagtgcgcatggaccccccctgcaccaacacaacagctgcttccacctacctcaacaacccgtacgtgcggaaggccctcaacatcccggagcagctgccacaatgggacatgtgcaagtgaggttccgtggccacctgtgacttggggtggtgggttgctggggcttgtgggcatcggcaggtttctcagggatcttctgtgtagagtttctcaatgagatgagctgtagaggatgtttaacatccatccctgacccctcagtggattgagagtcagccaattcattcttttatcttttttaaatttaaaatttttttgtttgagacaaggtctcactctgtcacctaggctggagtgcagtggtgtgatcatagctcactgcagcctcaaactcatgggctcaagcaatcctcccacctccccagtagctgggactacagacgcaccaccacccccaacaagtttttgtattttttgtacagatggtgttttaccacattgctcaggctggttttgaactctggggctcaagtgatctgcccatttcagcctcccaaagtactgggattacaggcatgagccaccccgcccagccccatttcattacgtagccacattggttgttgtttcacagttcactacagcctcaacctcctaggctcaagcgatcctcccaccttagtctactgagtagctgggtctacaggcacatgccaccattcctggctaatttttaaaaaatttttttgtagagacagggtctcactatgttgtccaggttggtctcaaactcttggtctcaagcaatcctccctccttggcctcccaaagtgctgggattacaggcgagggtccccacacccggccatcacattggttaataactattacttccgactgggcgcagtggttcacgcctgtaatcctagcacttttggaggctgaggtgggggaatcacctgaggtcaggagttcgagaccagcctggccaacatgaagaaaccccatctctactaaaaatacaacaattagccaggtgtgctgttgggcacctgtaatcccagctattcaggaggctgagggaggagaatcgcttgaacccaggaggcagaggttgcagtgagctgagatcatgctactgcactccagcctgggcaacaaaagtgaaactccatctcaaacaacaataacaaactgttaacttccatgtccagtctcctgtggccacccccccccacaaccccaagtaaaagggtaacactgggcccagcagggctgctcaggtccattttgattggtcagtgctcacactctaccctgttgtatgttgtgactcccacacctgctggcccctagacactaaatgccagatgcatcccagtcctcgtaacaaccaaaatgcgtcccttgtacatttctttttctttttttttttgagatggagtcttgctgtcactcaggctggagtgcagtgctgcgatcttggctcactgcaacctccgcctcccgggttcaagtgattctcctgcctcagccttctgagtagctgggactacaggcacgcaccaccacgcctggctaatttttgtatttttttttttagtagagacggggtttcaccatgttggtcaggctggtctcgaactcctgacctcgtgatccactcacctcggtctcccaaagtgctaggattacaggcgtgagccaccacgcccagcatccctgtacctttctaaatggtggtgagttgaggctgtctgaatcccagcccatccagcccaacatccaagtcagtcctagagaggtggcccccccccaaaaaggggagtggaacccagctgtctgccttctgggttggagcttggagataggagagaaggtctgatctgttgactacttttcgccccgacctggtcttcctggggcctgctcgtatgttcccggcagctttctggtaaacttacagtaccgccgtctctaccgaagcatgaactcccagtatctgaagctgcttagctcacaggtgagtggggagagcacagctggatcaccagcagccttaggaccccagagtagcacagcaagctgggggcccttgagacttcctgtcaggacaagggaagctgaaactccgaaaggcgaagcccagggtcctgtgattggtggggtcagaatttgaacctgggtttgtccccacccatgctgtcctgctataggaggcctaggggtctgcatcagccacggagtcttaagggtgagaagagcttcattcatgccaaaaatgggccagcagaggtccagggtgggaggagaccttgcacaaggtgatataggaagcactggcagggccaagttaggactaggttctgtccagcacagtggttaatagcatgggctctggagtcacatggcctgggtgcaagtccctgtactagccacataatcttgggcaaatttcttaaatatgagcctcaggttctccatctgtaaaatggggataataatgatatctaccttcacagataaaacatttagtagaatactggacatgcagtaagtcgttagaaaacatgaaaattccctggttcgtgttatctagcttggccccttgaatttcctgaggggtaggccttgaactagggaagggctggggactgggcttgttccacacccctcatttttaccccatcctgctttagaaataccagatcctattatataatggagatgtagacatggcctgcaatttcatgggggatgagtggtttgtggattccctcaaccagaaggtaaggtagagattcctggccctgggataggggctgctgtggaggattgggagcgggtatgcctgggagtggccagctggctgcctggctctggcccacagagggcaagtgtggaggaattcccagccctaaggtcttgctggtagctgtgagcaaggatgcagctgctgtaggctgatgtctttcctggtggggcagatggaggtgcagcgccggccctggttagtgaagtacggggacagcggggagcagattgccggcttcgtgaaggagttctcccacatcgcctttctcacgatcaaggtagggactgggcctgctgagagataactgggccggaggcaaaggagcaggacccacccgtcctttccctctggctgccttttaggctgggtcatgggtcaccatctggcccctgtatgggcaagtttttttggagaggggtggggagggttctgggaagaataaagggtttgggatgaaggaattgcccccgagtgagcagttatatggggaggagggaatggtggggtcaggagctcacgaacattgctcctcagggcgccggccacatggttcccaccgacaagcccctcgctgccttcaccatgttctcccgcttcctgaacaagcagccatactgatgaccacagcaaccagctccacggcctgatgcagcccctcccagcctctcccgctaggagagtcctcttctaagcaaagtgcccctgcaggccgggttctgccgccaggactgcccccttcccagagccctgtacatcccagactgggcccagggtctcccatagacagcctgggggcaagttagcactttattcccgcagcagttcctgaatggggtggcctggccccttctctgcttaaagaatgccctttatgatgcactgattccatcccaggaacccaacagagctcaggacagcccacagggaggtggtggacggactgtaattgatagattgattatggaattaaattgggtacagcttcaaatcccgtcttctctgtggcactgggggttagagggggcactacaggctatgaatgtgggaaaagaggggctgagaggggttggggtcctgaatgacagctgccagcttggggattgagggctcagacagctgctgtggacggtgtgggggcagtggacgccctgacatcagcaggccggttcttctcaatcacctctcgcagccctttggcaaagtggagatcagccccgatggtgaggaatccctgtgttggggagaggggagcctcatttattcattcagttattgaggccagagtttagagatcaagagacagagtgtttgtctttcaggaactcaatctaatggataattccatgtcaaggtgttaaaatgaggctgtaggagtgtagactatgggtgtcaaggagggcttcttggaggaggtgacctctgagctaagacctgaacaattagtaggtattgggatgggagaagagtgctccaagaagtcacagtgtgtgcaacggcttttaggagtctaagattaaaatgggaggggcgactggtaatgggggagctggggtcaggtaatggagggcactggggagctatagagagaggggaaggccctccctccttccccatcctgcccccactcaccgcatggttcgtcaccacctcatgcacaaagttgatgccctcaggtagtgggatctgcaccccacgccaggtccgctctgtgggtgggagcaccccgctcagtctgggcccgcccagttcacccctcctttcttcctccatcctcacaccccagccttaccattgagcatgggcatcaccccaatctgcagcatggtcttcagaggggcctgtaatgggatcagctgggaggggcgagggcggaaacagggcagtgagtcagggttgggtttgcctttagctgcccgcaggtgagcagttatatgaggagggggggatggtgagggtcaggatctcacgaacccagcccagcccacccacccttccccactcacagccagcgactccagtgcagaatggttggaatagattcggaacctgcgggaaagaaaggagccctgtgggcaggaagcctggaagctccccttcctcaggccacccaggcctacctgccagaggtgtctgagttgcaggctcagatgcccacctaggcacctttccaagtgctacaactttccaggtatcctcggggcagtcattgctgccacttgggtctccttttctccaagactgctactttttatttattgagcacctcttttttttttttttttttttttttttttgagacagagtctcgctgtgtcgcccacgctggagtgcagtggcgcgatctcggctcactgctccgtctcccgggttcacgccattctcctggctcagcctcccgagtaactgggactataggtgcccgccaccaagcccagctaattttttgtgtttttagtagagacggggtttcaccgtgttagccaggatggtctcggatttcctgaccttgtgatccgcccgtctcggcctcccaaagtgctgggattacaggcgtgagccaccacgcccggcctttattgagcacttctaatgtgccagacttctgctggtagctttgcaggtgttatttattttatgtaacaaaacttcacattgcttagttcctgtcagacactaagcatatttattttctttttttatttttatttatttttgagacagcgtctcactgtgttgcccaggctggagggcagtggtgtaattttactcactgtggctttgacctccagggctcaagtcagcctcccacctcaggcttccaagtagctgggaccacaggcgtgcatcactatgaccaactaacttttaaatttttttgtagagacaggatctcactttgtagctcaggctggtatcgaactcctggcctcaagcgatctacccgccttggtctcccaaagtgttgagattacaggtgtgagccactgcacccagccaacgtgtttaaaaagttaatattagtaaactgttttaaaatacagtaccaactggtttagtcctcaaaacaagcccaaggagtgggcactattaggatttgcactaatttatagatgaggaaaatgaggccctgcaaggttaagtaatttgcctgaagtcacacagctggaaagtgtcagaagctgcctctagaacctagggtcctaacctacattatctcctttaaccttagaacagcactgtccagtcagattttctgtgaaacgttttgtatctgcaccgtctactatggtagtcactagccacatgtggctaatgaaatgtggcttagtgcaactgaaaaactatttaattataattaatttaaatgtaaatagtcacatgtggctagtatctaccatattggatagcacagccctagaaggcagatgctacttttgcctgtattaaacacatggagaaaatgaggcctagaaagacaaaatgggctgggtgcggtggctcacgcctgtaatcctagcactttgggaggctaaggtgggacgatcacttgagcccgagaattggagaccagcctggacaacaaagtgagaccccatctctacaaaaaataaaatagtcaggcatggtagtgcatgcatgcagtcccagttactcgggaggctgaggctggacgatcacttgagcccaggaggtcaaggctgcagtgagctatgattgcaccactgcactccagcttgggcaacagagtgagactctgtctcaaaaataaataaatacaataaaataaggccaagcacagtggctcatacctataatcccagcactttgggaggccggggcaggtgaatcacctgaggtcaggagtttgagaccagcctgaccaatatggtgaaaccctgtctctactaaaaatgcaaaaattagccgggcgtggtggcgcacacctgtaatcccagctactcaggaagctgaggcagaattgcctaaacccgggaggcagaggtggcagtgagtcaagaccacgctattgcactccagcctgggcaacaagagcgaaactccttctcaaaaaaaaaaaaaaaagaataataacatttttaaaaaagataaaatggcctcaaggtcacaaagctgtgttgtgctgaggtttttgtcaaaacccatgttctgatctttgctgtgtgactgtgggcatgttatttaacattgctggacccatttgttcatctctcataatacctgccctgcctgcctctgggacatgtgagaatgcagaggagtcagactttaccaaagcactttggcatgcattaacaaagacagaccccagctctcagtggcttacaggtatcactgtactttaagcgcaacatccctgtggacaggtgtgattgtcctccaatcactgaggtgcagggaagtgcgcctgcctacctgcgcaggtccagctgcgtgcgcagggccttcccccggagagccatcttggcgctgagacgggcgtcctgcaggaacatggggaggaggatgttactgacccagaaggtcagtaacccacagcccatttttccctgacccccagccagcagcccccactctgggacccgtaccatagtcatgctggacagctggacctcaggctggtctggtgggaccagggcaatggtgacgctagcagtgacagagatggtggtgccagagggcttgatggtgcagcgcggtggggccaggacccgcagctccagcttcaatggggagtcaatcactgctgggctctgggggatgagcagcaggggcgggtcaagtccctgccatttcctttggagcccccagggaagaaggggaaggaaggcaggtgcagcttctgtcctctggggactctcatattgcaaatacagagggagctctggcttccaaaactctcacatctgcatctagccttcatgcctttgccacacaaagaaacaggaatgtgttcttctctttctgcttcctaaatacatctcaatattcaggtctatctccaatccagactctttgtggatgtcctttttgcattagtatctcagcccttgccatgtcttctgtttttgatatggagtctcactttgttgcccaggctggagtgcagtggcacaatctcggctcactgcaactctgtctcccaggttcaggcgattctcccgcctcagcctcccaagtagctgagattacaggcacctgccgccatgcccggctaagttttgtatttttaatagaaacggggtttcgccatattggccaggctagtgattcgcccacctcggcctcccaaagtgctgggattacaggcatgagccaccacacccaaaccccttgccatatctttttgctctctctctcctttttttttgagacagggtctctgttgcccaggctggagtgcagtggcatgatcacggctcactgcagcctcaacctcctcagctcaaattatcctgccacatcagcctcctgaacagctgagaccacaggttcatgccatcacgcctggcttatttttgtatttgttttttgttttggtttttgcttttgtgttttcgtagagacggggtttggccatgttgcccatgctggtctcaaactcctgggctcaagtgatctgccggcttcagcctcccacagtgttgggattacaggcgtgagccaccgtgcctggccatatcttctttctctaaactgctatgccttcttctataggcagtgaaggaatactataagatgcaactgcctaatcttcaccaaacatgattctaaacactgtatatgtgttggttcctttaaacctcataataaccatgtgaggccgatattattactgccaattttgttgttgttattttttacaaatttatttttcaggctgagtcgtcatggcagagaattgcttgaacccgggaggttcaattgcagtgagccaagattgcgccactgcactccagcctgggtgacagagtgagactttgtccccccaccgaaaaaaaaagatctgactaaaaatttatttttcaatagagacagtgtctcactgtgttgcccaggctggtctcaaactcctgggctcaagcaattttcctaccttgacctctcaaagttctcagagtataggcgtgagccatcatgcccagccatatccccatttttgagatggggaaattgaggcacagataggttaagtaacttgtagaggttatgtagttactcagtttcagaactaggcttgaagcccaggcagtctgacaatagagaccctgccctgccataaattggatgatgataatgactgaattatttcttttaaaatttgtaattctgctaggtgcggtggctcacacctgtaatcctagcactttgggaggccaaaaatgggtgatcacttgagcccaggagttcaaggacagcctgagcaacataatgaaactctgtctcaacaaaatataaaaattagcggggtgtggtggcacaagcctgtaattccagctactcaagaggctgaagcaggaggatggcttgagccctgggaggcagaggttgcagtgagcctagattgtgccactgcattccaacttgggtgacaaagtgagactcttgtctcaaaaaaaaaaataaataaaatgtgtaactcttactctcctccccaatacacaaataaacaaaagtatatgtgaattattattaaagccctcacacttgcaaagcttgggttctcactaatcctcacagcagctctgcgaaggagatggggcaggaaggagcaggaaggagcagaccgcttcacagacaggaacagccatgacaaggcgagggggattggccacagacaagaggccagggccctgtctgcgtggctgccactgggggccccacctgcacccctccttggtctcactggtgtgcaggtggccctatccctgcccccgccagcactcaccagcaggacaatgctcccaaagtaggtggccctcagcagcatgtccaggtcgtggggcacctgaacaggggaatcaggagtgagggagtgagctctgtcacagaccttctcttgcccatcccacaaacaggccatgacataccttgtcccccaccagcaacagctgcagggcccccgcccggaagtagctctccatggcagagtcgaagaagaactcagagaaggccacatacaccatccgctcttcctcctgcagctggggctccactgcccggttggggaggctccagttcctctcagtcagggggaagaaggccccctggggtggggcattcacagtcagggtcaaggcagactggcctggcacctggactgacagcaggtgtctcccagccccgtgctaggcactgtggggggatggtgggaacccagctgctgttcttggaggattcacaagcacatctcttaaaaggcattggaaggaggacacctgctaccagggggcgagcccgtcagactggaggagggagggtcaggaaaggtttcagggaagaggtgacatctgagtgggccttgaaagctagaggcagtaacaacagctactgtttacatatattgtgcatactcatgcttctttgccaagtactctaagctcttcacatagatcgacttctttaatctgcataacaacgtgtgttttcttactagattatttccatttacatgttaggaaactggccaactgaaaacttatgcttagggccgtgcagctagtcagtggcagagctaggatttgaacttcaggcattctttttctctttgtagagaaggaggtctcactatgatgcccaagctggtctcaaactcctgggctcaagcgatcctctcgcctgggcctcccaaagtattgggattacaggcatgagccactgcacccgactgattctagctcccgagtctgcactctgaaactgctatactcctctgggagaccaaaggtagtggctacacactggctatgtggccttgggcaagtgacgtcacctctatgagtaagtctccacattcctaaaattaggatgatgttagtacctgactcacagggttgtgagagaatgaaatgagattatttgtatagaaatttatgtccagctccttcgggggagttggggaaaggccgtgcatgagcaaaggccctgaggtgggaagccagggtccaatttgggaaagagcagctgcaaagaaacaggatgagatataaaaggtggggccaggtaagattaacaggggctcaaatgccagacccaggaggctgaacctaattctgtagtaacagggagccatagcattctcagtaatgggagtggcctcatcagagctgtgctttaagaagtaaaatcttgcaacttagcagagaaagaggtcttgttaggaagtcagaggtcatacaccagcccaagcagctcacccggaagtccatgtccaggttgctggtggaagccacaggatccttcatgagggaatagtcaatgccaacaagctcgtccacagaactgcgcactgcaggaaggggctcaagtcactcacggctgtgtgatgtgggataaggtgcttaacctctccaggctcagaggcccacccataaaatgaggatacatccttcacagggttgtcatgagggtcaaattagttttatgtggaaagcacttagggcctggtgtgtagttaggtgctcattaatgttagttattattattactaccactatagaggtttcaaaaaaataactaaacaagatggcatgggggggccgcgcatggtggctcacacctgtaatcccagcacttagggaggtcaaggcgggcggatcacctgaggtcaggtgttcgagaccagcctggtccaccacggtgaaaccccgtctctactaaaaatacaaaaattagttgggcatggtggtgggcgcctgtaatcccagctactcaggaggctgaggcaggagaatcgcttgatcctgggaggtggaggttgcagggagccaggattgcaccactgcactccagcctgggtgacagagcgagactccatctcaaaaaaaaaaaaaaaaaaaaaagatggcatgaggttcctttcccttggtttctcctacctcctccttcgcttcccatgcctgtgtgttaggtgtgatgggaaaatacctttgccccacagtagacagaggtcatggcttagaaaaagggaattcatggccaggcacagtggctcatgcctataatcccagcactttgggaggccaaggtgggcagatcaggaggtcaggagatcgagaccatcccggccaacatggtgaaaccccgtctctactaaaacacaaaaaactagttgggcatggtggtgcacgcctgtagtcccagctactcgagatgctgaggcaggagaattgcttgaacccgggaggtggagattgcagtgagctgagatcgcgccactggactccagcctggcaacagagtgagactgtaagactccgtgcaaaaaaaaaaaaaaaagaaagaaaaagaaaaagggaattcatgttaattgagcacctattagatgctaggtgatgaagacaaatgggatgccagtgatcagcatgcacatattgaggaccttgacaactattctctcagataatcctcacagcaaccccaggaggaggcactgccagccaagtgaggaaacaagcactttgcccagacagaaatgagcacttcacccaaaatcgcacaacaagtcagctccaggggccacatttgaacccaggactgttcaacagcagggctcggaaggggcctgctctgaggtgctgcatgacagctgcacacccagactcacccgccaccaactcaccaggcacggtgtccaggagggagttgagcaggaccgtccctgcgtggtagaggacagggcagatctgcgaggtgggagccagagtcagggccttctcaaagtgagagcatgcccacccttgccaccctgcgacctgtcgctgcccacacctgctggttgaggaggaagcgcatccctgaggtgatgaacgtggagagaaaatcatacaccttcctgtgaggagaggagaggccggatgagcccagaacctgcctccaccccagtccaggtccaggagaaatcagtgactagggaaatagtggcagtaggagtcctcagcttcagcctgaataacagctcctccacgtaggttttccaagaaccaggcccaaattccctctccagtctaattctcaagacctcctgacctactctctggtcccatcagtcaaatgaatccacccacattgcctcaaacccactctgagcatccccacatccatcggcttactgatgccctcccttccgccctctgcattcctactctgtattttcccatctgagctcagatgcttcctcttccaggcagtcttcccagattcccctcctctgaatccccaaagcattttcttagtccttctctccaggccctgatatcaaatgttttttgctccagataggctctgagctccttcctgcatcctcagggactggcatacactttgtttgatgaataaataatactgacagtgtaccaacaccaggttataatccatcatcttctctcccccatcctcttccagaacaagaacaatatccccttctcagcagcaaaaataaaaaaataggccgggcacagttgctcaggcctgtaatcccagcactttggtaggccgaggcggacagaccacctgagatcaggagtttgagaccagcgtggccaatatggcgaaaccctgtctctactaaaaatacaaaaaaagtagttgggcatggtggtgcatgcctgtagtcccagctacttgggaggctgaggcaggagaatcgtttgaacccaggaggtggaggttgcagtaaaccgagatggcgccactgcactccaggctgggtgacacagtgagactccctctcaaaaaaaaaattattatttttgttattattatttagagataccaattattgagaatccagtacatggccaaatgtgcatatcagatagtcctcacagttactcttatctaagtggccagcacttaaatatacatttatcatatgccaggtgctgttctaaatttttttttttttttttttttgagatggaatcttgctctgtcaccaggctggagtgcagtggcacgatctcagctcactgcaacctccgcctcccgggttcaagcgattctcctgcctcagcctcccacgtagctgggactacaggcacgtgccaccacgcccagctaatttttgtatttttagtagagatggggtttcaccatgttggccaggatgatctcgatctgttaaccttgtgatccgcccgcccagacctcccaaattgctgggatttcaggcatgagccaccacagccagccttgttctaaatattttttacatataccaacacaaataatcctgacaacgatcttataaaataggatcttataaaatgaggatattgaggcaccaagcttcagtgacttggccacgttcacacagccaggaagtgacagagctgagctttggacccagttggtctgattcccaggcctatgcactttgcattgcgctaggcagatgagctgtggggctcgaaaagggtgagctggggttggggctggggcttacttgaaggttcccccgaaggccgcgtgcattctggagacagaggcctggcaggagacattggacactttcatccgtccagcgggatcccgggagagctccagaccagtgcggatggacacaccctcagctgaggcgttgatgtagcccccatcatagctgccaggggggttaatattcactccaggtaggagctcaattgagtcttcagtgcccccatgcatcaccatacctcttaataaggtttcacctctttccacacatcctaccaaaccttcctatcaactcgtatgaaatgcatatgcctgtttctgttacacagatgaagaaacggaaactcaggaaggctaagggggctgcccacagccccacagcacctccagccctcctgacccactctccactcccctgagggtgctgggtccttacaagaaccagtagagcagctgtctccggaagcgcagccccaaggaggcattggtgatttgaagcatcagctcctgctgtggctggaaatcgagctcggaagatgtcagttgcagctctgtgaccttcaccctacaggaggcctcagggtcagatccagggccaagaagagggaacttcccccaacgacaggaaatttgtctgctcccctttcaagtccaggcctggggaagcgggagtgggtggaatgaattcttccattgtccctcaagtgcccaacttagacttgggtggctcaaagttgaacttgggtggctgagagaggaggtcttcctgatccaggtgttaaaaatgagcttcaccccatcgcttaaaagtcttgtttgtttgtttgccaggtgcggtggtggctcatgcctgtaatcccagcactttaggaggccgaggagggcggatcacttgaggtcaggagttcgagaccagtctggccaacatagtgaaacccgtctctaccaaaaatacaaaacttagcagaccgtggtggcacgcgcctgtagtcctagctactcgggaggctgaggcaggaaaatcgcttgaactcgggatgcggaggttgcagtgagccaagatcgcgccactgcactctagcctgggcaacagaacaagactccctctcagaaaaaaaaaaaaaaaaagtcttgtttgcttgcaccccctcccctcccacaccctggggttgctacacccggtcttttaatagagtccgttcactttgcctccatcacctaagctccgtctcacatctcaattccttattccccctccctcatcctaaaccatacttagagccttcagtttctccacccctccgattaactccaccccgtgcccgagactccactctcatctattgggaagttccttgactccacctttctgttgttcttcgaccacgcctcacatccactggtcctgcttccttcttggccccctctacattttcaaggccacgcccatctgcctggtcccgcctatgatgactggcttggcctttatcttttcggccccatccggtttcttaagtcttgcctcatcgatttggccacgccccatcccactcagcctccagtctcccgagaccctgagatttctcgggccccgcctccaccgccgaggccccgccccggatcgcgaggccccgccccccacttactcagagatgttgtagtagaagtggccttctttgccccgcaggtccggaatggtgatagtctccagctcttgctccagaaagcgcagcccctcctgcttcactgaagcagcagagaaacccttacttagctcccgtgcccactgttggggcgaccccaaccccgtccgctcccgtccgtccctgtctgcccctgcgccttacccagctccagcgccttggaggtgacgcggatcttgcagcctgggaactctgcatgtgcgcctgccagcagcgctaggaagagggccccgaagagggccatggcgagcgggcctgggggtggggtggggtcgcaggagttatctgagccgcttaaacccattccttggacgtccaaccataagtgggaactagcctggatcgttaccctccagataactcttcggggaacttggaaccaataatcttgcctccatatggcagatgtggaaactgaggctcagagaggcgatgcgacttgcgttctggctcccagaggatttgggacacgggggaggggacgttcccagttccctcgtgctaccgccgcgtgatgagtttggacctccaggggaccagcccccacacccccaacaacctcccctttcctttagcggtgggcccatgcaggcttgcacgttgccacggcaacgactgcacgcgcattcttggagggtggcttgcggtctcataggcctcgcgcccggggaggagaggaggtggccgaccagaccgtgggctcccgggtctcccggctccctcaggtcctaaatctctcccattagagattctgcctggagcccccatgttagcgttctccttcatcggctctcctccccacgccggcttcagtgcaccacgcggctcggcgagggactgggaacgggatagggacgcgccccaactcactcagcggtggagctggggggcggcgcggtcacgtgggatggcgggcagctcaggggatccgggcgacggggtctggcgggcagggttgttccagccgcctttataaagccggcctccccgacccctcctcctctctgcagctctcccctcctcccttgggggctgggaggggacggggcgggacgctggcagccgggagagtggaaaaggctgcacagagccccgtgacaagcccggccgctgtctggacaagtgggagacccaagcccagggagagggaaggaaatgcaggagccggcccactcagccccaacaatcccactttgctgggaccttggttcaaattacaattatccatgtcttcctgcatgatcttgggcaagtcacttcacttgggtcactgaccctcagtttcttccttcagcgaaatgtgcacgatgataggaactacctcttgggcctttattacaaccaggtccaggcacaaagtcaaggaatattttttctttccctgccacccacaatcatctcgggacctccttgcctggctttgctatgggcccccctacctgtctctgtgtcaccacctggggaccttaaggtcccagagacctttcccacttgggaaagcaagactagacaagtgctgtcagcccaggaacataccacaccggctgaaatcagaaggaggtctgccatttatcgtggctggtggattgttttttctattttttttatttttattttttgagacggagtctcgctctgtcccccaggctggagtgcagtggcgcgatctcggctccctgcaagccccgcctcccgggttcacgccattctcctgcctcagcctccccagcagctggggctacaggcgcacgctgccacgcccggctaattttttttgtatttttagtagagacggggtttcaccgtgttagccaggatggtctcgatctcctgaccttgtgatccgcccgcctcggcctcccaaagtgctgggattaaaggcatgagccaccgcgcccggtccactggtggattttttaatgaacccttggagcaaggtgctctgaacagcatccccgcccccacccccacccccacctccatctactgcttacagggttcccggaccctaggacagggcacagagtgggtgcttgccacctttttgttgccaaatggacgaaagaaaggggaagcaataatcatgtctgctgagcatgtatttagcaccaaacactcatctaggaaggatgactaactcatcctgatttgcctaggactttccccattgtgtcttttttttctgatataatccacagattcacaaaaatagttccatttccttttttatttaattaattaattaatttttttgagacacagtcgtgctctgtcaccaggctgcagtgcggtggtgtgatcttggctcactgcaacctctgcctcctgggttcaagtgattctcctgcctcagcctcccaagtagctgggactacagccatgtgccaccacacctggctaatttttgtatttttagtggagacagggttttgccattttggccaggctggtcttgaactcctgccctcaagtgatc

SEQ ID NO: 72 - DNA, 1504 bp, Homo sapiens
  Genbank Accession No. AF052157
gtgaaggtcacagagctgcaactgacatcttccgagctcgatttccagccacagcaggagctgatgcttcaaatcaccaatgcctccttggggctgcgcttccggagacagctgctctactggttcttctatgatgggggctacatcaacgcctcagctgagggtgtgtccatccgcactggtctggagctctcccgggatcccgctggacggatgaaagtgtccaatgtctcctgccaggcctctgtctccagaatgcacgcggccttcgggggaaccttcaagaaggtgtatgattttctctccacgttcatcacctcagggatgcgcttcctcctcaaccagcagatctgccctgtcctctaccacgcagggacggtcctgctcaactccctcctggacaccgtgcctgtgcgcagttctgtggacgagcttgttggcattgactattccctcatgaaggatcctgtggcttccaccagcaacctggacatggacttccggggggccttcttccccctgactgagaggaactggagcctccccaaccgggcagtggagccccagctgcaggaggaagagcggatggtgtatgtggccttctctgagttcttcttcgactctgccatggagagctacttccgggcgggggccctgcagctgttgctggtgggggacaaggtgccccacgacctggacatgctgctgagggccacctactttgggagcattgtcctgctgagcccagcagtgattgactccccattgaagctggagctgcgggtcctggccccaccgcgctgcaccatcaagccctctggcaccaccatctctgtcactgctagcgtcaccattgccctggtcccaccagaccagcctgaggtccagctgtccagcatgactatggacgcccgtctcagcgccaagatggctctccgggggaaggccctgcgcacgcagctggacctgcgcaggttccgaatctattccaaccattctgcactggagtcgctggctctgatcccattacaggcccctctgaagaccatgctgcagattggggtgatgcccatgctcaatgagcggacctggcgtggggtgcagatcccactacctgagggcatcaactttgtgcatgaggtggtgacgaaccatgcgggattcctcaccatcggggctgatctccactttgccaaagggctgcgagaggtgattgagaagaaccggcctgctgatgtcagggcgtccactgcccccacaccgtccacagcagctgtctgagccctcaatccccaagctggcagctgtcattcaggaccccaacccctctcagcccctcttttcccacattcatagcctgtagtgccccctctaacccccagtgccacagagaagacgggatttgaagctgtacccaatttaattccataatcaatctatcaattacagtccgtccaccacctcaaaaaaaaaaaaaaaaaaaaaaaaaaaaaaaaaaaaaaaa

SEQ ID NO: 73 - DNA, 1750 bp, Homo sapiens
  Genbank Accession No. L26232
gtggccgccgtcgcccggatcccctgagctgcccgccatcccacgtgaccgcgccgccccccagctccaccgctgagcccgctcgccatggccctcttcggggccctcttcctagcgctgctggcaggcgcacatgcagagttcccaggctgcaagatccgcgtcacctccaaggcgctggagctggtgaagcaggaggggctgcgctttctggagcaagagctggagactatcaccattccggacctgcggggcaaagaaggccacttctactacaacatctctgaggtgaaggtcacagagctgcaactgacatcttccgagctcgatttccagccacagcaggagctgatgcttcaaatcaccaatgcctccttggggctgcgcttccggagacagctgctctactggttcttctatgatgggggctacatcaacgcctcagctgagggtgtgtccatccgcactggtctggagctctcccgggatcccgctggacggatgaaagtgtccaatgtctcctgccaggcctctgtctccagaatgcacgcggccttcgggggaaccttcaagaaggtgtatgattttctctccacgttcatcacctcagggatgcgcttcctcctcaaccagcagatctgccctgtcctctaccacgcagggacggtcctgctcaactccctcctggacaccgtgcctgtgcgcagttctgtggacgagcttgttggcattgactattccctcatgaaggatcctgtggcttccaccagcaacctggacatggacttccggggggccttcttccccctgactgagaggaactggagcctccccaaccgggcagtggagccccagctgcaggaggaagagcggatggtgtatgtggccttctctgagttcttcttcgactctgccatggagagctacttccgggcgggggccctgcagctgttgctggtgggggacaaggtgccccacgacctggacatgctgctgagggccacctactttgggagcattgtcctgctgagcccagcagtgattgactccccattgaagctggagctgcgggtcctggccccaccgcgctgcaccatcaagccctctggcaccaccatctctgtcactgctagcgtcaccattgccctggtcccaccagaccagcctgaggtccagctgtccagcatgactatggacgcccgtctcagcgccaagatggctctccgggggaaggccctgcgcacgcagctggacctgcgcaggttccgaatctattccaaccattctgcactggagtcgctggctctgatcccattacaggcccctctgaagaccatgctgcagattggggtgatgcccatgctcaatgagcggacctggcgtggggtgcagatcccactacctgagggcatcaactttgtgcatgaggtggtgacgaaccatgcgggattcctcaccatcggggctgatctccactttgccaaagggctgcgagaggtgattgagaagaaccggcctgctgatgtcagggcgtccactgcccccacaccgtccacagcagctgtctgagccctcaatccccaagctggcagctgtcattcaggaccccaacccctctcagcccctcttttcccacattcatagcctgtagtgccccctctaacccccagtgccacagagaagacgggatttgaagctgtacccaatttaattccataatcaatctatcaattacagtccgtccaccacc

SEQ ID NO: 74 - DNA, 2512 bp, Homo sapiens
  Genbank Accession No. U03877
caatgcactgacggatatgagtgggatcctgtgagacagcaatgcaaagatattgatgaatgtgacattgtcccagacgcttgtaaaggtggaatgaagtgtgtcaaccactatggaggatacctctgccttccgaaaacagcccagattattgtcaataatgaacagcctcagcaggaaacacaaccagcagaaggaacctcaggggcaaccaccggggttgtagctgccagcagcatggcaaccagtggagtgttgcccgggggtggttttgtggccagtgctgctgcagtcgcaggccctgaaatgcagactggccgaaataactttgtcatccggcggaacccagctgaccctcagcgcattccctccaacccttcccaccgtatccagtgtgcagcaggctacgagcaaagtgaacacaacgtgtgccaagacatagacgagtgcactgcagggacgcacaactgtagagcagaccaagtgtgcatcaatttacggggatcctttgcatgtcagtgccctcctggatatcagaagcgaggggagcagtgcgtagacatagatgaatgtaccatccctccatattgccaccaaagatgcgtgaatacaccaggctcattttattgccagtgcagtcctgggtttcaattggcagcaaacaactatacctgcgtagatataaatgaatgtgatgccagcaatcaatgtgctcagcagtgctacaacattcttggttcattcatctgtcagtgcaatcaaggatatgagctaagcagtgacaggctcaactgtgaagacattgatgaatgcagaacctcaagctacctgtgtcaatatcaatgtgtcaatgaacctgggaaattctcatgtatgtgcccccagggataccaagtggtgagaagtagaacatgtcaagatataaatgagtgtgagaccacaaatgaatgccgggaggatgaaatgtgttggaattatcatggcggcttccgttgttatccacgaaatccttgtcaagatccctacattctaacaccagagaaccgatgtgtttgcccagtctcaaatgccatgtgccgagaactgccccagtcaatagtctacaaatacatgagcatccgatctgataggtctgtgccatcagacatcttccagatacaggccacaactatttatgccaacaccatcaatacttttcggattaaatctggaaatgaaaatggagagttctacctacgacaaacaagtcctgtaagtgcaatgcttgtgctcgtgaagtcattatcaggaccaagagaacatatcgtggacctggagatgctgacagtcagcagtatagggaccttccgcacaagctctgtgttaagattgacaataatagtggggccattttcattttagtcttttctaagagtcaaccacaggcatttaagtcagccaaagaatattgttaccttaaagcactattttatttatagatatatctagtgcatctacatctctatactgtacactcacccataacaaacaattacaccatggtataaagtgggcatttaatatgtaaagattcaaagtttgtctttattactatatgtaaattagacattaatccactaaactggtcttcttcaagagagctaagtatacactatctggtgaaacttggattctttcctataaaagtgggaccaagcaatgatgatcttctgtggtgcttaaggaaacttactagagctccactaacagtctcataaggaggcagccatcataaccattgaatagcatgcaagggtaagaatgagtttttaactgctttgtaagaaaatggaaaaggtcaataaagatatatttctttagaaaatggggatctgccatatttgtgttggtttttattttcatatccagcctaaaggtggttgtttattatatagtaataaatcattgctgtacaacatgctggtttctgtagggtatttttaattttgtcagaaattttagattgtgaatattttgtaaaaaacagtaagcaaaattttccagaattcccaaaatgaaccagataccccctagaaaattatactattgagaaatctatggggaggatatgagaaaataaattccttctaaaccacattggaactgacctgaagaagcaaactcggaaaatataataacatccctgaattcaggcattcacaagatgcagaacaaaatggataaaaggtatttcactggagaagttttaatttctaagtaaaatttaaatcctaacacttcactaatttataactaaaatttctcatcttcgtacttgatgctcacagaggaagaaaatgatgatggtttttattcctggcatccagagtgacagtgaacttaagcaaattaccctcctacccaattctatggaatattttatacgtctccttgtttaaaatctgactgctttactttgatgtatcatatttttaaataaaaataaatattcctttagaagatcactctaaaa

SEQ ID NO: 75 - DNA, 998 bp, Homo sapiens
  Genbank Accession No. AB035480
gcggcgggcgcagacagcggcgggcgcaggacgtgcactatggctcggggctcgctgcgccggttgctgcggctcctcgtgctggggctctggctggcgttgctgcgctccgtggccggggagcaagcgccaggcaccgccccctgctcccgcggcagctcctggagcgcggacctggacaagtgcatggactgcgcgtcttgcagggcgcgaccgcacagcgacttctgcctgggctgcgctgcagcacctcctgcccccttccggctgctttggcccatccttgggggcgctctgagcctgaccttcgtgctggggctgctttctggctttttggtctggagacgatgccgcaggagagagaagttcaccacccccatagaggagaccggcggagagggctgcccagctgtggcgctgatccagtgacaatgtgccccctgccagccggggctcgcccactcatcattcattcatccattctagagccagtctctgcctcccagacgcggcgggagccaagctcctccaaccacaaggggggtggggggcggtgaatcacctctgaggcctgggcccagggttcaggggaaccttccaaggtgtctggttgccctgcctctggctccagaacagaaagggagcctcacgctggctcacacaaaacagctgacactgactaaggaactgcagcatttgcacaggggaggggggtgccctccttccttaggacctgggggccaggctgacttggggggcagacttgacactaggccccactcactcagatgtcctgaaattccaccacgggggtcaccctggggggttagggacctatttttaacactaggggctggcccactaggagggctggccctaagatacagacccccccaactccccaaagcggggaggagatatttattttggggagagtttggaggggagggagaatttattaataaaagaatctttaactttaaaaaaaaaaaaaaaaa

SEQ ID NO: 76 - DNA, 43411 bp, Homo sapiens
  Genbank Accession No. AC004643
agcgctttgggaggccaaggcaggaggattgcttgaggccagaagtcgagaccagcctaggcaacgtagcaagaccgcatctctacaaaaaataaaaaagttaggctgggcgtggtgggtcacgcctgtaatcccagcactttgggaggccgaggcgggcagatcatgaggttgggagatcgagaccatcctgcctaacacgatgaaaccccatctctactaaaaatacaaaaaattggccgggcgtggtggcaggcacctgtagtcccagctacacgggaggctgagacaggaaaatggcgtgaacccgggaggcagagcttgcagtgagccaagatcgtgccactgcactccagcctgggtgacacagcgagactctgtctcaaaaaaacaaacaaacaaacaaaaaataaaaaagttagcagggcatgatggcatctgcctgttgtcccagtcactcaggaggctgaggcaggaggatcgcttgagcccaagagttcgaggctgctgtaagctatgatcatgccactgtacttcaacctgggtgacagagtgagaccctatctccgaaaaaaacaaaaacaacacaaatttcccaagagtgattgaggctgagagctaggcaagctgggatgaaggctctgctatgtacccacagacaaatgacttagcctctctgagctgggctcctcacctgtgaatggcgtgacctcatagggttgctctgaggatgaaatagagtatgacatgcaggtgagtcatctctggtggccacgcggagatcaccagcaaggactaagtgctggcacttcacactcatttaatcctcacacctggccaggcacggtggctcacaccagtaatcccagcactctgggaggctgaggcgggcagatcacctgaggtcagttgaagaccatcctgggcaacacagtgaaaccctgtctctactaaaaatacaaaaattagccaggtgtggtggcacacgcctgtaatcccagctacttaggaggctgaggcaggagaatcgcttgaaaccgggaggcagaggttgcggtgaggagagatctcaccaccgcactccagcctgggggagagagcgagactccatctctttttttttttttttttttttttttttttgagacggagtctcgctctgtcgcccaggctggagtgcagtggcgcaatctcggctcactgcaagctccgcctcccgggttcacgccattctcctgcctcagcctcccaagtagctgggactacaggcgcccgccactacgcccggctaattttttgtatttttagtagagacggggtttcaccgttttagccgggatggtctcgatctcctgacctcgtgatccgcccgcctcggcctcccaaagtgctgggattacaggcgtgagccaccgcgcccggccgagactccatctcaaaaaaaatcctcacatccctataagctaggaactatcatccccattttacagatggggaaactgagggccgcagaggttaatcagctgaagggcataggcacccacatctggtttgtggccaactggatcctggaccgaagctatgtgatgccagcacccatgggccaagcactttgctgtactgttttattggttcatttctggtttataggtctacgctccctcccatggcccaggtggactgtgaaccttctgggagtagggctgtaatcacttcatcctgggatgagctcagcctggcaggaggcgctcaagatgtgctacgtgtgggtgtgagtggggcccagggtgactggcatttggaggggacactgagcttctatttccagagggtcacatagcagcacccaggggaggctgggatgtcttcagtcctccagtggctaccaggctgctcccacaggtgcagtgggagaaagtgtcaggcttgctgggcaatgtggctgtaagacaaatctctggctcccctactctctgctggcagaaaaccctgtcccagccccaggacccaggagtcccagttcctaagtcacccctccaaggagtccttgctccccttttcccacaagccaggagtcccagcccccaccctcctcctatttttctagaacccaagtaagtagcccccagtcccccaagactcaggagtcctgatccccagccagaggtgcacggacccagctgacaccagccagccagagctgatgtgcacagccccttctacctctgcactccgtgacgccaggtgagtagctggaagtcagccgaggagcaggtattgcatcatggatattggcaaatgcaacgagcgagggctattgttttagccggggagcctgttgttaaacgcttaccagcacgccactgctcccagccttccatctgtcctgctctccaggccaggagcccctgtcacgaggcccagggagccctggagtctggagataaatcgtgacaagacacaaggccatggatggggcatcactgctgcccaagccaccctgggtccccagccccggaccttcccatctccacaccaaagcccctgtcccagacaagagcatggtccccagctctgcataactgaggaactgagaaccccaggtgtggagccacacggactcgggcatggctctgggcaagtcactctcactgcctgggctacagtgtccttgtctgcggcatgggaatcagtaaagagcatgaccctaaagccacacttgtgctgttcaccttccagttctgaccaggggaccccaaacaaggtggaggacccccctccgcctccgagcctcagcttcctcatctgtaagatggggatgacagcagttcctcgtcatcaggtcatcatgaaagtcaacaagttgagccggggaggtggctcactctgtaatcccagcactttgggaggctgaggtgggcggatcacgaggtcaggagtttgagaccagcctggccaacacattgaaacaccatttctactaaaaatacaaaattagctggatgtagtggtgcatgcctatagtacccgctactcaccaggctgagacaggagaatcacttgaacccgggagcggaggctgctgtgagctgagatggcaccactgtactccagcctgggcaagaagagtaaaattccatctcaaaaaaaaaaaaaaaggtcaaaaagttatgcctataaaagagtttacttgaccagaagcagaggctcatgcctgtaatcccagcactttgggaggccgaagcgggaggattgcttgaatccagaagtttgagaccagcctgggcaacatggtgaaaccccacccctacaaaaagtacaaaaattagctgggcatggtggcatgtacctgcagtcccagctactggggaggctgtggtgggaggatcgcttgagcctgggaggacgagactgcagtgatggtgccactgcactccagcctgcgtgacagagcaaaatcccatctctaaaaaataaaaaagagtttacttagcagaatgcttaagatgtcagattcggtgttgttgtcattgctaataatttcctgccccacagggcaaggcagtcgtgacgggaaaggagcggaggctacctcaatgtaggatctgcaaacagtagatgctcagttaactggccgggccatttgcaaccacagcaggttgggccagtgccccccacccaggaggaagcgactctccctcgaccccgcccggccattcaggcagccagggagcgccccggcccctcccgcggccccgccccttcacctgtgttggccgcacacctggagccgcctccggaagaggggaccggagaccgcggggacctcggagggagcccggcggcttcgggtgagagcctgggggacgccgagggccgggcccctcgagcctggggagggcctggtccggccgcgtcggcggagaaggtgggggagccggggcgggggcaggggaaccgggatcgccggggaaccgggggcgccggcaggaactcagccgtcgggggtgagcccagccgcttctctgggcttccgacgcctggggctggaggccccaacacctgggcagctaggtgcggaaggggagggggagcggtctccaggtccctgtctctcgcgtggaggggggcgggggagcggggcccgcgagggccaagtcagggaggtccccgggagcggcctgggggcggctgggctgggaccaccgtgacactcacgtcctgcgagcagggctgcacatggacaccgggcgagaggaggagggagagcacgggtgtgtgtgcctagtgggtggtgaccccccggagggctggggctggtaaagctgttgtgtcgggccctctgacccgagcccctgaaccccagcccctgagccgccctaggggagcccagggctcccgtccccaggggcggaccgggaagtaaacagaaactccgagccgcgctgcggccgggcggccggcacaacctgttacctcgccctgtcctgggccccacgccagggccctgggaaactggggggctgagggtcagggctcctgagtccggaggggtgggggcatgaatgcctgagtcccgtggaaaatggggactggggtgggaatccttggtgggggacattggaggtggggacctctgagtctggagggtggagtcaaagcacctgctcaggaggtagcaggagaatgagggcgagagacccgggaggtcaggggctgggatctgggcttctggcaggggaaggagctggattcctgggggcgaagatacctcagttcccaagccttagggtcctgcattcctgagagaagaggctgggctcaactccaactgctgagtccctgagaacctgggttctgggaactgtctcagatggcgaggggctacaagccaaactgctgggttctgggaagagaggggacagggagcagaggtggcctgtggccctggagcactggaatgagctttcctggggacagagattgtctggcagaggccaaaggctgggcaggtcatttccttctgcttcctgcctcagtttaccccagggacattaacggaactgggtagccaaaacacaggtcattaaccctttgtggcccaggaagccctggctgcaggaccgggcaggctggcagcaggtggagaattcctggagggccaggtgctgggcggagggtgagcccctgtcaggctgcagagtagagtgtcccgcagccacctgtccccgcagatgctgcaggtgacatgagctctccagatgggcccagcttcccgtccgggccgctctcagggggcgcctctcccagcggcgacgagggcttcttcccctttgtgctggagcggcgggactcattcctgggagggggtccagggcctgaggagcccgaggacctagccttgcagctggagcagaaggagaaagacctgctgttggccgcggagctcggcaagatgcttctggagcgaaatgaagagctgcggcggcagctggagacgctgagcgcccagcacttggagcgtgaggaagtgagctagcactggacggggtgggtgggtgggtgggcaggggaggacgggtgggcctggagaggacaagggaagggagtcaggcaagggaaggagagaggagctggggaggacagccgggcgagggggggactttggaacaggtcagagctgggcccagtccccctggcagtgttgcccagtggcaaagaacatgaactctgggtgccgggcacagtacctcacacctgtaatcccagcactttgggaggccaaggcaggaagatcactagcccagtgttggagaacagcctgggcaacgtagtgagactctgtctctacaaaaaataagaaaattagctggatgtggtggtggcacctgtagtctcagctactcaggaggccgaggcagggggatcaattgagcccaggaattttagagtttgaggctgcagtaagctatgattctatgatccactgcactacagcttgggcaacagagtgagatcctgaaaaaaaaaaaaggaaggaaggaaggaaggggaaggaaggaaggaaggaaggaaggagagagaaagaaaagaaaaaaaggaaaggaaaggaaaggaaaaaaggcatgaactctgaggattaagacctggattcaggccaggcatggtggctcacacctgtaatcccagcactttgggaggctgaggtggctggatcacttgaggtcgggacttcaagaccagcctggccaacatggtgaaaccccgtctctactaaaaatacaaaaaaaattagccaggcatgatggggtgtgcctgtagtcccagctaattgggagactgaggcaggagaatcacttgaacctgggaggcagaggttgctatgagccaagatcatgccactgcactccagcctgggtgacagagcgagactgcatctcaaaaaacaaaaacaaactgggttcagaccctcgtccagctgtgtgaccctgggtcagctgctggccctctctggatcttgggtccagctcctcagcagtatagcggaacaccaggcgacagtcatgggtgtccactccttgcctggcactgggctgagtgctttccatgactctccattgattcttgctcagcccaatgaggtaggaacagttccctctgcccaggttctatttttggcccaattcttgctctggggctcacatctggtctcctgaacaccctcctttatctgctgcgtcggccccaaccactgccctgagccagacctgggtagctaaccctctccaccaggccacctagtgggcatctcaacacaagtggcacttgattccacgcactcgattccatgcccccatcacctgctgtccccatcctcgccttcccaaccttgaggaccagagcctgtgcacctccttggactctttctctatttttttttttctttttttggagacagggtctccctctgtcacccaggctatagtgtgcagtggtgcaatcatagctcactggaacctcaacttcacgagctcaagcaatcctcccatctcagcctcctgagtagttgggactacaggcacacatgcaccaccatacctggctaatttttgcattttttgtagagatggggtctcaccatgttgcccaggctggtctcaaactcctgggctcaaccaaactgcctgcctcagcctcccaaagtgttgggattacaggtgtgagtcaatgcgctcagccaacctttcttgagtgaacaaattccccccaatatccgcaagcccttttgattcttctaaactccaaccacccactggtcggctctgcagcctccaagctgatcacagatcacagcctccatcccttctgccacagacactccagccaccttctcctgagtccccagcttccactcttttattattgttgttatttacatggagtctcgctctgtcgcccaggctggagtgcagtggtgcgatcttggctcactgcagcctctgcttcctgggttcaagtgattctctcacctcagcctcccaagtagctgggattccaggtgtgcgccaccaagcccagctaatttttgtatttttagtagagacggggtttcaccatattggccaggctggtcttgaactcctgacctcaggcgatccacttgcctcagcctcccaaagtgctgggattataggtgtgagccaccgtgcccaggccccagcttccacctttgacccctggagcccgttctctaagggacagcccaggactttcaaaaactgcaaatcagatcatttcactcctcaaccagaatctccccctcacacttagaatgaaaccaaaacccttccccagggcctaaaagtcccagagaactgggctcctccccgacctcatcacagcagcaccacccctttctcccctcctccaagaagggcagccgaaccaccctctccccgacaatgagggctcttttcatttcctccaagaactcacgcttgttccctcaggaactttgcacttgctgttccttaatgcctagccttctttctggtggctcttcttgtcctgcagaagtcgactcaaacatgacgtcctccttgaaggaccctccacccccaccccactccttactctctatcatttcccgggtctctttacagcccttactgtctccctgaaactacctggctccggcatgtgtccatgccctctggactctaagctgcttgaagcagtgaacttggtggtctcacgtgccgctgacagcagaccccagaacaagtggagctcaggaaatgtgggaggattgatagcagtgtgggtggatagacttagagatattgtgtccaggccacaaggcatcagcagagccgagcatcagccaggacaatctgaccctgaacctgacaacttaatcctgaagctgtgttgcctctgcagtattcggttaagagttctgctgcctgagttggcatccctgctttgtgaagttattgtgtgtcggctgggcacggtgtctcatgcctgtaatcccagcactttgggaggccgaggagggtggatcgcttaaggccaggagctcaggaccagcctggccaacatggtgaaaccccgtctctcctaagaaaacaaaaaaatttgccgggcagggtggcgcacgccagtaatcttagctacttgggaggctgaggcaggagaatctcttgaacttgggaggcggacattgccgtgagctgagatagtgccactgcgctctagcctgggccaaagagtaaagatctgtctcaaaataaataaataaataaaaaataaaaacaacaataaatgactgtgtgtccttaggcaaggcacttagcaactcttgagcttgttccatctgtaaacccaggacgttagtgattctccctctagtggatgaaatgaagcaatgcagatagagccctaatgcagggtacctgcgagtcgctgcagcagctgtggcaattgtcaccttcatccaggcccatcccgctttgagggcctagagagagtgggccagaggttaacccccgattcatctgcctccccacgctgggcatctgggtgtgccagggcattcccccgctggtcagacaggtttttgggccagggcggggctgaccagggttaattagagggaactggctaggaggagctggggagggggctgggcagagtccaggcctccagagcccctgggacacagcaggtgtgtgctgccatgggccggggcttgaactctgccagactcaggcgccaaaaacggcgcttgcgacctcaggtccagaagccccggcagcagctggaggtgagtggtcatcagagatccccccaccccaacccttgccccgggcccacgcgtcctgtctgctcggaaccttccctctaaatctctgggtcttgctcacgcttcctccctcactctcccttgcttttgtgtctgtcttggacacaaggcccccttaggctttctccctaggtgtctgtccctccatcgccatctctctgtgcctgcccagtctcatcggtgcctctctgcctctgtccctctgccctggcccccacagcggctccagcaggagaaccatgagctccggcgaggcctggcagcccgaggagccgagtgggaggcccgggccgtggagctggagggggacgtggaggccctgcgggcccagcttggggagcagcgctcagagcagcaggacagtgggcgagaacgggcacgggccctcagcgagctcagcgagcagaacctccggctcagccagcagctggctcaggtgggatggccctgaccccagggccctggacaaggttggggaggatgcctgggtccccagcggggagtaggtgcattgggcttggtgctgaggctcctctgtccctctttccacctccccaggcctcccagactgagcaggaacttcagagggaactggacgcccttcggggacagtgccaggctcaggcactggctggagcagagctgaggacgcggctggagagtctgcagggggaagtgagtgtcagctggggctgggggattatctgagccaaaaaagccgggctgagggctgggaggggctgcccctgtccccagctctcaggcctttccccagaaccagatgctgcagagccgccggcaggacctggaggcccagatccgaggcctgcgtgaggaggtggagaagggtgagggcagactgcagaccacccacgaggagttgctgctgctgaggcgggagcggcgggagcacagcctggaggtgacctgcagggctgggggactacaactgcctggacccttagcaatggcttcagggctttctgggagatgaggccggagctggatcactgggaggcccagaggctggcccacaagagcatgggcattagcccatgggcaaatgggagccacggaaggctgttgagcaggtgaggcatgctcttagagtgcatcagagcctggcagctggaagagcagggagggggctggtgccagagctcaggccaggaatgacagcccctagaccacggctgcgcaatggagacggagaaaaagaaatgaaaagaggatgcggtgtctgatgttagagatcaaaggagtctgcactttggggtcagcttgccttccttcgcatcccggtgccccttcttacttactactgtgggacaagcagcctcagtagcaccaataaatgctgcatgaaacaattactgaatgaggaggtagactgggcaggggaggagatggggctcttcgaggtgcggccctgctctataggcgaggaaactgtatatatccgctgagggaggtgcacggcccaaggcgcccagcgatccaggaacgggaacagcctgggccgctggggtgcggggctctccgcggcacccccgtgtggacctgccgcgggatgtcggcgttgcgtgcgtcccgctgaccgcccgcgcttccgtctgcgggaccgtccacagctggaacgcgcacggtcagaggctggggaggcgctgagtgcgctgcggaggctgcggcggcgcgtctccgagctggaggaggagtcacgcctccaggacgccgacgtgtcggctgcctcgttgcagtcagaactggcccacagcctcgacgacggcgaccagggccagggcgccgacgcacccggagacaccccggtgagctcgtggggccccagcccccttacctgtgccatcgagagggttgcaggctccgcctttcctcctttccccaataaactccacaccactaacccatttctttggcccacagaccacccggtccccaaagacccgaaaggcgtccagcccccagccttcacccccggaagagatcttagagccccccaagaagcgaacatccctcagtccagcggagatactggaggagaaggaggtggaagtggccaagctgcaagatgaggtggggcagagggcacggtgctggatgcacggcccctccagctgtcagtttctgtctcccatgtccacctcccagcctttgcccactaagctccctatacctggatcggctttcatctcaacaaacttacttcaagagccagcctgtatgccacctcctccaggaagacttcctggacagcacctctgcccttagttccactcccaatgcttctccctgcatccctcctgcagggttataccactccaactaaccctgctccaccccaccccgcaccagcctgaggggctcagagggctcatatcggagtctccagcacagggccacggctgcctggggtgtctgtcgcaggcagaggaggggtggggagagccagagtcggggctgctgggagaagcagggaggcccattggcccatctgccgcacggcccccctcctctgctcacagatctcgctgcagcaggcagagctgcagtccctgcgggaagagctgcagaggcagaaggagctgcgggcgcaggaagaccctggggaggccctgcacagtgccctctcagaccgggacgaggccgtgaacaagtaagcctcaagccattgaccaccgccccagcgccctctgggccctcctgggctcctgattcctcttctgatacgggttatgatccccactcccacccaggggccccctgacctccttgatctaggtgtttgcagccctcctcccgcccgggtccagaagtcccccgccaccccggctccctgaggccctagcgccctcaaacgcgtcttctgctcctgcccgcctagggccctggagctgtccctgcagctcaaccgcgtctcgctggagcgagactccctgtctcgggagctgctgcgcgccatccgccagaaggtggcgctcacgcaggagctggaggcctggcaggtgaggggcggggcccgtgtgcggggcggggcaaggggcgggaccggcgctgagccgaccacggcctcccgcaggacgacatgcaggtggtgatcgggcagcagctgcgctcacagcgccagaaggagctgagcgcctccgcgtcgtcgtcgaccccgcgccgtgccgcgccccgcttctcgctgcgcctgggccccgggcccgccggtggctttctcagtaacctcttccgaaggacctgacggctgggcccagagggctgcccttgcccacttaggggctcactttcctcttcaggccaatggagcgacagggcccagattgtcttccaaaagaagctgatgccctccccgccccaggatgctgggcaagggctcatcgggagcaggggctcatccggagcaggggccagctttgtggggcaggagctccaggtgggtggcaggggcaggtgaacagagctattttccgaattaatataggtctatcttttctagggcagggatggggctgggtatttatgtatcaagatcggacagagtaatatataaatcactccaccgatttggcccccattcatagaaagaaagagcatggtaaaaaagcctgaaactttattgtaaaaaaaaaaaaaaaagaaaatgaaaaacactctaaaaccctgagctggctgggggtgtcgtcagagatcagaaggacagggagaaggctcggtaacccaggttggtgaagacatccacccggcagctgttgcctgcagctgtcaggacctggaggaaagaggggcatgactggcctgcccacacccctgcctcccagccgctccgcggcccctgccggacccaccttgcactcaggcgcggcaggctgctggttgaggctgaggctgagcagccctggggaggagccaggcacctgggccttcagctccccgctcagctgccactggttgacgcagcggccctggccagctgacagaatctgcagaggacagggaaggtgctcaggggtcaggactgaagggaagagtcagtgggggtggcagaagtgagacacagggcctcaccaggtcctggtagaaggtgacgtgcttctgtggcgcccggatggggaagatggtggtgggtgtggaggatcggaggtgccagagggtgagggctgggccccctccacagacctggacagaaaggtgggagtccccagctgtgaaccacaggcccacagctgacagggcccggagctgccatcccatcccacagtctgcccagctcaccatccagtcggaatcagttgccaaacatccaatccagcgcccattgtggggcctcgagcactcctgggatggggaggggaggagggaaagaggtgaagacctggagaattcaaggagttgggggagaagaggacaatggccacggtcacaccctcacctcgtgcttatagacctcgatcgtctggacctccttggctgtgcgcaggtctgcggggaaagaactgtgagtggtgccccacttgcctcagcctccttcactgccatcttgccctccaaccagccacctgcttaccccaaagtcgaacagctccatcctcgccacctgacagcacctctgggctcctttcccgcagtgccaggcagtggatgtagtctgtgtggccccggaggaccctctgcatgtagaggggcgatgtcaggaggagacctaggaagagtgcctctccctgacctagacctgctctagggctccaggaccctgctcaccgtgaaagtcccagtttcaaggtccatagtgtgcaactgacagtctcccccagccaggatgagggaattctcctgtggaggagcaggatgaggcagaaagtcaatgtcaaatcaggataggcagagggtgaaggatcaaagtttggaccaagaacagtcacatggggctcagaccttggggaccagcagcaaagcgttgatctcaggcacttccaggctggtcctggggaaggaaaggcaaggtcagtgaggaagtggcttcaccctgatgcaccctctatccacgtggccctgctcacctgtatggaggctgacgacgccacagctccttacagcccttcaaaagagaaaataccaggtgacctcaaaggctctctctgggtccaggcaccccagccctttcccaagctcgactccttaccttcttgagcatctccgcccaaagccaggccttcacctccccatccccagcactaagcagatgtcgatcggtggaaaccatgctatagacgggcccatcatgggctaaagagaaatgcagaactgagtgagccaatcccacccaaagtcctgaagccagactccacagctatacccaccttggaaagtcaccaccggcttcttactttcctctttggcttctgagctcaaagcagaggacaagctgcagggacagcggaggggacccaggagtcagaaacgggggcatccgtcccatgagggccaagtgccagggctaatgggtggacagcggcagagggtacctgaagatggcaatctgcccgtaattgttgccagccgccagaaacttcccacatggtgagacgctctgggagaagatggtcatatggagccgctgcaaggcctggaacacctctgtctgcaggaaaagactggatgaggcctgcctgggacgtatgaaacctcccatccacagattcctccctgcttccccgaaaacctgccaggcctcccactgtcctgacttctcagccttcttttgaggcggccccgccccaagccagcacctgcccatgcagtcccatgggtggctccaagaagacactgaagaaggggagagttgaggtgatgcctcagggacctctgagcaagcacccaggcctctcctgccagcttcctcaactgacaaatggagctcacagaagattccatcacaattagatgagctagtgtatagacaagagctttacatggggctgtcactcagtgcttaagccgggtgtggtggttcatgcctgtaatccagcgctctgggaggccaggagtttgagagcagcctgggcaacatagtgagactctgtctcaaaaaaaatttaaaaatgtggggccgggcgcagtggctcacgcctgtaatcccagcactttggcaggccaaggcaggtggaccacctgaggtcaggagttcaagaccagcctgaccaacatggagaaaccctgtctctgctaaaaatgcaaaattagctgggagtggtggcgcatgcctgtaatctcagctactcaggaggctgaggcaggagaattgcttgaatctgggaggcggaggttgcggtgaacccagatggagccactgcactccagcttgggcaacaagagtgaaattccatctcaaaaaaaaaaaaaaaaaaaaatttggccgggcgtggtggctcacacctgtaatcctagcactttgagaagccaaggcaggcagattacctgaggtcaggagttcgagaccagcctggtcaacatggtgaaaccctgtctctactaaaaacacgaaaattagctgggcatggtggcacacgcctatagtcccagctacttggagggctgaggcaggagaatcgcttgaacctgggaggcggaggttgcagtgagctgagatcgcgccactgcactctagcctaggtgacagagtgagactctgtctcaaaaaaaaaaaaaaaagtgctttgcaagaactagaaaattaaaaaaaaaaaaaaagtacctctactaccccaacatagaaaaacgtactgatttataattcctactctctgacttgcgttaagcccctgaagcacttctgggttactatcccgcccccctggtcagagtctgagtcccacaaatagcccaggcaaaacagggctcagggcacgattccctgcccgccccgtcccagccatgcgtgaactacaaaccccagaaggcaacgcgcaccacgtccgtctcacctgacccagaggcaccgcgagcggcacagctcgctccatctccagaactacaagtcccagagtgctccgcgcgcgacgcaacctcacgaggccttacgtgcctagagcggttcctctccgtggcgccctaccgccttcggcgcgaaggtggctggtgcgtaccgtcccgaaccctaggagccgaggtgagcgccgcgaagacccccgacattaagaagtggtgtccaccgcagcccccttaagccggataccctcccccaccccgaggagcaagcctgccttccgccacgcgccgcccgtcttccgcgcccgcgcagaacctcgcggctgtgcccgcctaaagccacgcccatcctctcttggccacgccctcagagactcctcccctgtcgcccagatcccacccgcaggaccccaaaacccaatgatcctgcagcagcccttgcagcgaggcccccagggaggggcccagcgcctcccgcgggccgccttgggggtgacttggggcctggacgccaggtgcgtgtaggggaccagggtgggcctgaccaagggccgcaggagctttggctgggtgctcaggactggtctgcaggatgaatacggggtggggcgaatcggcggggcttaggcgtgagctgagatgggactggggctgcggctgagggtcgagacttccgaggtaccctgctggatggtccaggagagcggggaccggcaccagctgagacaggaatgggcttggggctcctggctgatgctgcaggcttaggcgggcagatccttgggaaggggccaagagggtggggtgcaccaggctctctttttttcccagctcccctctccgaggagctgtgcccatgagcaccaagcggcgcctggaggaggagcagtgagtttgggggcagggagggactcccaacaagatctctgtcacctctggtccccaacaggctgcctcctgtgtcagtatcccagcctgcctctctgccatctctccccagggagcctctgcgcaagcagtttctgtctgaggagaacatggccacccacttctctcaactcagcctgcacaatgaccacccctactgcagcccccccatgaccttctccccagccctgcccccactcaggtaggttcctccactggccaggccttctgcagaatcacaggcggtcctcacagctgacctcaggccctgcctcatcgtgccatttttagctctagctgacctctgggttgtttcccatcttggctctttggaaagtgctgggaacccaggagcccctggggacctggacctggtgggaggtgctcagctaggccagcctcagctccatgccctgacagtcatttcctcttctaggagcccttgctctgagctgcttctctggcgctatcctggcagcctcatccctgaggccctccgtctgctgaggctgggggacacccccagtcccccctaccctgcaaccccagctggggacataatggagctctgagtgctggtggacagtgcccctcccaccttccttcttccccacaacagaagagaccagcgactcccgcaaagggacaaggttcctccctctcctgcagagtaggcatctgggcaccaagaccttccctcaacagaggacactgagcccaacggagttctgggatgggaggggtgggagcatgggaagggaggcatcccacccccaagaagaactgaataaagattgctgagcaaaggaaggcttcagtctggaacctggggcttttggggatggtggagagggcagaggcgcgggatgctggggtttctcctcaagatcttccctggaaaactgttagggccagccaggtccttgccggctgagttccaggcattgagaatgtgtgagtcagagcctcacccccgcccccgcggctggctgactcactccctccctccagctcaggggagtcagtcggggatcactgcctctccaaaccatttaaagttaaagattcttttattaataaattctccctcccctccaaactctccccaaaataaatatctcctccccgctttggggagttgggggggtctgtatcttagggccagccctcctagtgggccagccccctagtgttaaaaataggtccctaaccccccagggtgacccccgtggtggaatttcaggacatctgagtgagtggggcctagtgtcaagtctgccccccaagtcagcctggcccccagggcctctaggaaggagggcacccccctcccctgtgcaaatgctgcagttccttagtcagtgtcagctgttttgtgtgagccagcgtgaggctccctttctgttctggagccagaggcagggcaaccagacaccttggaaggttcccctgaaccctgggcccaggcctcagaggtgattcaccgccccccaccccccttgtggttggaggagcttggctcccgccgcgtctgggaggcagagactggctctagaatggatgaatgaatgatgagtgggcgagccccggctggcagggggcacattgtcactggatcagcgccacagctgggcagccctctccgccggtctcctctatgggggctgcaagataagaggtggggtcgtcagcagcagagaaaaggtcgagtgctgacagggctgggcaggccagggcacacttactggtgaacttctctctcctgcggcatcgtctccagaccaaaaagccagaaagcagccccagcacgaaggtcaggctcagagcgcccccaaggatgggccaaagcagccggaagggggcaggaggtgctgcagcgcctgggggcgggactcggagtcagacctcgcccctctccaggccagccccgccccctaagactgagccttctgccttctcccaaacgtggcctcctccctgaccggagccccctcccagctcccacctcctcccgattgatttcccagatgcaaagctctcggccccgctctgcgcaccagccaccctccctcccagtctggggtccgctggccactggccctgccccccactcacagcccaggcagaagtcgctgtgcggtcgcgccctgcaagacgcgcagtccatgcacttgtccaggtccgcgctccaggagctgccgcgggagcagggggcggtgcctggggagggggcctcgggtcagaggctgggggcgggactcggctattctggggtctgaggtcagggtcggccggctcgaataacgtgagtcaccggcgccctccccgcgcattcctcacaggtgaccgcacggcccgaccgggacacggcagctccgggagggagggcgtagcgcgggacgctgggggtggggggggtcaggtccccacaacccccctgccgccggcgggtgactcactcctgggcaccgggcccgaccccagtccctccccccgcatagctgggcactgaagtcaccggatggaagggggcaccccacatggtatagagggcacagaccctagtgcctctcgacggcctccccaactcgtcgatcactggggctagttagaccctgtacggaccaggctgggggcgtgccccttcctagactaaacatcccgccctcactcactttctctctccattcgaagtacttcggacttgtggaactgaagacccccccaaccccaattggacggtgggagaaactgaggcccggattgtgaatgaagcttggagagtgatggaacttcccacagccgggagcgagctgtttgaaggccacctgaccccagatccccacatccgcctgttcccccagttcggcgctgttctccagacacccagtccggctcccgagccccggcccggggttccccgaccccggagtcccgcgtacctggcgcttgctccccggccacggagcgcagcaacgccagccagagccccagcacgaggagccgcagcaaccggcgcagcgagccccgagccatagtgcacgtcctgcgcccgccgctgtctgcgcccgccgccggccggcagggacccacggccgccgccccgcccccgcccccgccttccggggcggagctctcgcctccgcccgccttgaggtccgcttcgggacgccccgccccgcggcgcccgctcagttcagtcattcattcaacaaagtcctggcgcgggagctgccaggaccccgcagggacgcagacccccttccttgcccagccggtgatctagtccagcgtgcgtggtgtggggaaatcaaaaattagacacgagtgctcgcttcggcagcacatatagaaatcagacacgaacggccggacgcggtggctcacgcctttaatcccatcagtttgggagtctgaggcaggcggattacgaggtcaggagttcgagagcagcctgaccaacgtggtgaaacgccgtctctactcgaaatacaaaaattagccgggcgtggtggcgcgcgcctgcaatccgagctactcaggaggctgaggcaggagaatctcttgaacccgggaggcagaagttgcagtgagccgagatcgcgccactacactccagcctgggcgacagagtgagagtccgtctcaaataaataaataaataaataaataaataaataaataaacaaacaaacaaacaataaaaagaaatcagacacacgaccaatccatgcagagatcactgcagcttccttccccccacctccccttgagattgcgtctcactcttgctcagcctggagtgcagtggtacgatcacggctctctgggctcaggtgagcctcccacctcagcctcccaagtagctgggaccacaggccctgccccaccacgtccggctaatttttgtattttgtgtagagaccagggtcttactatgttgcccaggttagcctggccactacagctttgttaagggcccggggggtataacaattaaacctgaggtcaggagctcgagaccagcctggccaacatggtgaacccccgtctttactaaaaataaaaaaaagagagaagttagccgggcgtggtagtgggcgcctgtaatctcagctactcgggagactgaggcaggagaatttctggaacctgggagacggaggttgcagtcagtcgagatagcgccattgcactccagactgggcgacagagagggcctccatctcaaaaaacaaaacaggccgggcgcggtggctcacgcctgtaatcccagcacattgggaggccgaggcgggcagatcacgaggtcaggaaatcgaggccatcctggctaacacggtgaaaccccgtctctactaaaaatacaaaaaaattagtcgggggtggtggcgggcacctgtagtagtcccagctactctggaggctgaggcaggtgaatggcgtgaacccggaaggcagagcttgcagtgagccaagatcgcgccaccacactccagccttggcgagagagcgagactccatctcaaaaacaaacaacaacaacaaaaaaccagcaacataaaaataatattatctggccgggcgcggtggcttaagccggtaatcccagcgcagtgcgaggccaaggcgggcggatcgcttgagtccgggagttcgagacgcctgggcaatataacaagaccctgtctatacaaaacaaaacataaattagctgggcacggtggcgtgtgctgcctgtagtcccagctactcaggaggctgaggcgggaggatcgcttgagcccagaaggtcgagactgcagtgagccgtgatcgcaccactgcactccagcctgggtgacacagtgaaaatatttctctaaaataataccaatagtatgccctttaatttgtaccttaggacgtagttacataataaaatgcagacttgttatctccattttgcagagtaggaaacgaaggctcgggaaggttaggtgagttccccatgtcaccgcgctgcttaagtggtgaagcggagtctcaagctctgttctaccctaagcctggcgccctcaccctgggtgagtctggacgtctgccagcccgaggcgggcccagcgaccccagcctccagcgcccccctctgacaagcctgggattcgcacgcccgctgccgtcagggacagggtctctgcccctcctccggggcggtggtccagtgacgtcaccgcttctttaagacccccgcctccgcccctgtcccgacactcggcctaggaatttcccttatctccttcgcaggtgagtccggggctagtgtgcgtgttggagagacgcctcttggggccgggtgcagggtggtggcggcgtgggtaggggtgcgtgcgaactcgggctgcggccacctggatgggcgagtccctgagggggtcggccggtccgcgcccaagcctccgaggtgatagggtccttcggggctcccaagggttaaacgcccctcccccctccccagggacaaagactccgaaacccctggcgcccctcccccacctgccttgcctctcggggcggggcgcccctcccccctccccctcacctgggggagcggaccttgcggccactgcagctatagaacccctccagggcgcgcggctcccaggctggggtggtcgggtgggccggggcgccctcggacagagtctttttcatgcagtgcatgaaaaagaaaggggcaggggcacactcagaggggagaggcctgggcgcctataccagcgcggccccgaccctaactcggccagaggcctaagggccggacctgagcgctggggcaccgtgccccagccagtctccccaaggtggcctgctccgcccaggcctggggcccccggctaatgagtagagcctgccctccgaccgctgccggccgggaaaagtttaggtccaagccgtacaatgaaagtactctgggcagtgggaggccacagcccggccctagtcagaagtgattccctccacgacctccaacactgaggggacacaggtgcaggccaggtggcggtgggagaactggtgttgaggggagtctagcacggcattttcgtctagaattcataggaaaaggccctcagccttgaggctatgctctccggcgcctagggcaggtcagaagggtggggccagggagttatccactggctttgggggaggaactgcttttagatgggggattaatgatgcttttcttcatctctcctggtcctggtgtctgccagcctggggtgtggaaccaagttgtgagggacattgggtggtgggaggaagcttaggatctccaatcttagtgttgaaattaacaagttttggttgggcacggtggctcacacctgtaatcccagcactttgggaggcttgaggcgggcagatcacctgaggtcaggagttcgagacccgcctggccaacttgatgaaaccctgtttctactaaaaatacaaaaattaagaccaggtgtggtggctcatgcctgtaatcccagcactttgggaggctgaggcgggaggatcacgaagtcaggagatcgagaccatcctggctaacacagtgaaaccccgtctctactaaaaatacaaaaaaattagccgggcgtggtggtgagcgcctgtagtcccagctactcgggaggctgaggcaggagaatggcgtgaacccgggaggcagaacttgcagtgagccgagatcccgccactgcactccaggctgggcgacagagcgagactccgtcttaaaaaaaaaaaaaaaaattagccgggcgtggtggtgtgcacctgtaatcccagctacttgggaggctgaggcaggagaatcgcttgaacctgggaggcagaggttgcagtgagtggagatggcaccactgcactctagcctgggccacagagcgagactcctcgtctcaaacaaacaaacaaaacaaatggacaagttttgagccttaaactcagggctagaattgaaccattctacacggaaactgcttggaaatcgcaccgtcctgtcatcctgctttttgccgccttgcagcctgatcactggctctggccttggactgtcattgtataggtttcatcctgttatctttcatttgcattcaggatagccagggcagggctgcttgcacagtcactgtcatcagccagtgcctgtcacataactagaaagaataataaatgctaaagcattaagtgtccattttgcccacgagaagtgaggctcagggagcatgtgttgactgagttccaggatgtgatgaccactttccagggtgcatgcccctagagtcctgtccacatgtggcctgaggtctgggcctgccaggcctcaccttgttgtgcttctgtcccaaacacagtgcagctccttcaacctcgccatggcctctgccggaatgcagatcctgggagtcgtcctgacactgctgggctgggtgaatggcctggtctcctgtgccctgcccatgtggaaggtgaccgctttcatcggcaacagcatcgtggtggcccaggtggtgtgggagggcctgtggatgtcctgcgtggtgcagagcaccggccagatgcagtgcaaggtgtacgactcactgctggcgctgccacaggacctgcaggctgcacgtgccctctgtgtcatcgccctccttgtggccctgttcggcttgctggtctaccttgctggggccaagtgtaccacctgtgtggaggagaaggattccaaggcccgcctggtgctcacctctgggattgtctttgtcatctcaggggtcctgacgctaatccccgtgtgctggacggcgcatgccgtcatccgggacttctataaccccctggtggctgaggcccaaaagcgggagctgggggcctccctctacttgggctgggcggcctcaggccttttgttgctgggtggggggttgctgtgctgcacttgcccctcgggggggtcccagggccccagccattacatggcccgctactcaacatctgcccctgccatctctcgggggccctctgagtaccctaccaagaattacgtctgacgtggaggggaatgggggctccgctggcgctagagccatccagaagtggcagtgcccaacagctttgggatgggttcgtaccttttgtttctgcctcctgctatttttcttttgactgaggatatttaaaattcatttgaaaactgagccaaggtgttgactcagactctcacttaggctctgctgtttctcacccttggatgatggagccaaagaggggatgctttgagattctggatcttgacatgcccatcttagaagccagtcaagctatggaactaatgcggaggctgcttgctgtgctggctttgcaacaagacagactgtccccaagagttcctgctgctgctgggggctgggcttccctagatgtcactggacagctgccccccatcctactcaggtctctggagctcctctcttcacccctggaaaaacaaatgatctgttaacaaaggactgcccacctccggaacttctgacctctgtttcctccgtcctgataagacgtccaccccccagggccaggtcccagctatgtagacccccgcccccacctccaacactgcacccttctgccctgcccccctcgtctcaccccctttacactcacatttttatcaaataaagcatgttttgttagtgcatttggtgttgcagcaggttactgagtgcccaccctggctaggggaagagatgggcataagtgagtcacgatcccctctccccgtggcttgagtgagcatacccaccaggcagaacctagagccagaccttggcctgacagccaccaagggaggccacctggctgtgcctgcccagccccagcggcggcgcacagattagagggagcccagttacaaatgctctttatttccaactcgagggtggggatgttggggagagggaggtgatgggcaggccctccctgacaactccagggttgggagggcatggtctgctccctggttttggagccaacgagctgctgctgttttggtgaggccagggttcctggggcaggggagggctcagaagagaaggaaggccagccagtgtcctgggcaacggaaggaaacaattactggggaggtgggggcaggccagggttcccaacacctctaggctgcccaacttgggggagaacatcaaaggggaccccactgagaagagctcagccaggccagctgacccagccctgcagccaggtgtagcttgggcttttggaaagtgggttttcctggggaaggaggttgtgatggagcagggcatctggtcatcaggccaaggtcgaaagggcggggcagtggggagcagtgggctcccaggggaaacctccgcctcacacgtagtccctcttgtccagtccagatgcacccgagcgggaggggatggagtagcccagccgaggtccgcggggccgctcgacctggggcggggggcacgtgcagcagaggagccccccgcccagcataagcagtgcagccgccgcccagcccaggtagagggaggcccccagctcccgcttgagggcctcagccaccagggggttgtagaagtcctggatgatggcgtgcgccgtccagcacacagggatgagcaccaggatgccggcgaggaggaggatgacccccgcggtgagcacgatacgggccttggcaccttcgtcctccacacacgtggtacactgggcacctgtgatggccaccaggaggccaagcagggccagcaggagggcaatgacacagagggcacgtgcggcctgcaggtcctgcggcagagccagcagtgagtcgtacaccttgcactgcatctggcccgtgctctgcaccacgcaggacatccacaggccctcccacaccacctgggccaccacgatgctgttgccgatgaaggcggtcaccttccacaggggcagggcgcaggacaccagggtccccagccagcccagcacagccagggtcatgcccagcagttctaagccggtcgaagccatctggcccctcggttaggtcttctcagccccaggcggcctaggtgactcagagggtgtgtctggtgtgctgggtgggtgtctctgtgtccagcaggagggggaaggcttgttggtgtccccaagccaggccagtcctcagttccatgaaaggcgcctcttgaaaggcgcctcctctccgtgcctcttgcaggtgtttctggtcctcgcggagcacaaagcagactcgtagtcccgctcggctgagtggtgggtgtcacctcgaggggcctccgcccatcggatgccctgagggtgctgctgctcttaccaccccgctgtcacacctgggctgagctcgcacaggccctccagacgcactgccaggctgaggacagccacgtctcctgccggctggcgcaggttcccactgagcgactctgacagtgccacctggggactctgcgggctctcggctgcaggcggggttttaaggcccaggcaggggaggagcagagtgaagtgcagggaggccgggataggggagacctgagccacggggagggtgcggggctgggggttcgtgggcagcggatggatgaggggcctgggggccagcgggggatgctgcggctgagtggggacaggggaggaaaagcgtccgtagcatctgtgcatgtgggaaccaagggtaaaggaggggaagatggaggacaagctgaggaagaagagacggatcgggggtcaaaaaagtaacaggctcaggacagaaacacacacagggggcgtcggcttgccttcctgagcctcctccttccgcagcccctccccagccgcctctgctctcccccagccgagtttcgtgatgcaaacatgccccagctccccgagtatcgcacactcccgcccgcctgggactctctggaatctgatccatcccccgtctcagcccagtggccccgctagctcccgggggaaggtccccgcctgcactgttccccagacgacaggtgcctggcgcccagctcaggtggcatcgccctggcaacggcctagaaaactaccccccacttcaacctcagctcaggtgcgctcttgccacccctgctgctgaaaccgaggctgagctgagctgcctaagatctccagaggccagaggatgaggggcctgttgtggaggttggggggcactcaggaagggggatggaggcgggacgggctggggctggaacccagggtggggcacagcccaggacccggttatgttccatgggtgggtgagtgagtggccagtcaggcctcccgggccaaaacaccccagaggtgggcacgggggttaagtccagggactcaagtgtccccaagacctgccttccagtttgcaggaaagccttacctccggaaaaaccccctcagagcctgtgattccactcatggggacagcctgggagtcccactgaccaaagctcaaatcctgacccctacctgggacaggtcatggaaggtcgaggtccttaacctcctttggtcaaagacccacttgagaaaccccgtgggactcacagaacatgcacccacaaacatgtgcccctcatttgtgggggagggttcatgaactccttcaagcccctgcctgggtgctaagaacctctgaggattgttgtctgaaaaaggggtgtgacggccaggtgcggtggctcacgcctgtaatcccagcactttgggaggccaaggtgggcgattcacgaggtcaggagttcgagaccagcctggccaacatggtgcaaccccgtctctactaaaaatacaaaaaattagatatcccagcactttgggaggccgaagcaggtaaatcggaaggttaagagatcgagaccatcctggccaacatggtgaaaccccgtctctactaaaaatacaaaaattagctgggcgtggtggcacaagcctctagtcccagccactcgccactctggaggctgaggcaagagaatcacttgaaaccgggaggtagaggttgcagtgagccaagatcgtaccactccactccactccagcctggcgacagagagagactcctcaaaaaaaaaaaaaaaaaaaaattagctgggcgtggtggcgggtgcctgtaatcccagctacttgggaggctgaggcagaagaatcgcttgaaccggaggcagaggttgcagtgagccgagatcgcaccactgcattccagcctgggtgacagtgggagactctgtctcaaaaaaaaaaaaaaaaaaaaaaggaaaagggatgtgaggaacattgtctccattcatacactttccagggaggtacagaggatcctcagagtgggccctcacctgggactgcctctcacctgcctggtgctgggagggctggggtgtgctggagcccactggccagtgcgggcagggctggaggtgcccaccacacacatctggtggctgcaccacttcacggcattgccttcggggagccagtggccaggcacacccctgctcagtgcccctcacctagtgggtgggacattgtgtataaagggctctaacctcaaggagcggtcagggttcaaacctaggggtatgagcatcgcttctgcgaaagggttttagcatcttttgggtccgggcactgaggctcacgcctgtaatcccagcgcttaagaggccaaggtgggaggattgcttaaggccaggagcttgagacccacctgggcaacacagtgagaccccatttctaaaataaaaaaaaaaatatatatatatatatatacacaaaaattagctgagttaggtggttcctgtctgtagtcccagctactcgggaggctgaggtgggaggatctcttgagcctaggagttagagtctgcagtgagctatgattatgccaccgcactccatcctaggtgagaccctgtctcttaaaaaaaatgatacttttggaagagagatttatactttccttcagatttgcaaaggggccttgacccaaaacagcttaagatcctcccctgcaaacacagagacaggccagcgccaatcagctggtctgtaaggtaaacagaagcctggcctcctcttcaccaccccctgggcctctccactgaggggggctcctccggtacgaggggggctgacctggtggccccacagagtctggaagatgggggggtgatacagaggctggaaaatggccatcagtggactcagggaatcttgtggcaggtttgtccagctcacccagcccctggggctcagatttcacagggttggggtggggagagcagagattgcagacggaggcaagccggtcagcgggctccctcgcagccttccaggggcctccaggaatccagccacacaggtttgggcagctgtcaggaggcagcagcaagcctgcctccctggaagtccccccacccagcagccccaacccaggggctattctcttccctgggccggaacaagtcctccttgtcctagggcctaaggtgatcggctcatcccacttttttgagggacattcccagcttgaatattgggtcctccagggaaaccgggacggctggtccacttgctgtcgggccctgcctcggtgactcaccggttccacattcagctctaaacccctacgttgtagcccagtggcgggctgcacacatccagtgagcgctgtgcccggaaagggcataagaggaccccaggggtttttttgtttgtgttttgagacggagttttgcgcttgttgcccaggctggagtgcaatggcacaatctcggcttactgcaacctctgcctcctgggttcaagctgttctcctgcctcagcctctcaagtagctgagattacaggcatgcgccaccacacccggctattttttttctttttttgtatttagtagagacggggtttcaccatgttggtctggctggtctgcgaactcctgatctcaggtgatccgcctgcctcagccttccaaagtgctgggattacaggcaagcgccaccgcacttgctcggggaccccaggtttgtgttttgttttgttttgttttgtttttttgagacggaatctcgctctgttgcccaggctggagtgcagtgatgtgatctcggctcactgcgacctctgcccgctggattcaagcgattctcctgcctcagcctcccgagcagctggaactacagacatgtgccaacacacccggctaatttttgtatttttattagagacggggtttcaccatattggccaggctggtctcgaactcctgatctcgtgatctgcctgcctcggcctcccaaactgctaggattagaggtgtgagccaccgcatccagccgaccccaggtttttaagaccccaattcctctttggcccaacatctccacaccggagcaagaaggaaagcaagcccacactccagggactagccagcagagtgggtggaggctgctcagcaaatgcgcacacccccacctcagtgaccaacccactggacttgccttcacagtggccctgtgcggcttcaggctcctcccaccccaagtctctaagataaaacacagtatctccccaagccccttggggagagtaaaagtggagaaacatcttggagcctaggagaggctggaagagggtggttggggagctgcccatggtgggaggattcccaggacacatgggtagcaattagcctgttgtcctcagccctcactagacctaggttgggaggtcctagaccctctcctaggcccccgtgcacctggattcagttggatcttgggaaaggaagggttaaggttggggcctaatcagggactggaatgccattgatatggaaaagtgggggccccttggtgtggttaccatctcaatggcactttaacacctccagcgaagtcccctcccccatccaccacgtctgggaaaagaggtgggggaggggaaccttccccactgtactaccctgggaggaaaggaagccggctctccaccagtcccttcctggagcgacaaaatggacctcgtttttgttccgtctaggaggaaagaggggcagggaggctcaggtgggcagaagaaaccagagatcagcttagatagggtcgaagtgggttaacccgcgcctcttagagggggaagtgtggcctgaccacaaaggaaaggaaggaagttaccaggagctaccatgcgccaggaacagtgcgggggtgggtgtgggggcagcacactaagaaccccaagggcagagtcacccactgcgcccggaggagccaagacccagatcttacaggtagagaagctggtcccctagctcccaaaccaaaaggtgcagctaaatctcggtgttgcagctgtcaccctcacgggctcactgcccaccttcacagacaggaacaagctcagggagctgagcgaacctgaccaagtgcacagcgggaagcaggacacacctgacaccaacccagaccctgactttggagctagcccccctaggtgggctaagagagcctcctgaacctctttcccgacagggcagcggggcagggcctctccttcttctgggcctcccaagcaccatcccgttcctccttgtcccaaattcttcgaggctcccagtacagggaaacctctgcagaaaactgcatttggatctgattacggaagaggccccctccaccagctggctcactctcattgccatgtccctggcaagggaagtgccctttgctccccacttgcagggggcagcgggctggactcccagaacctcatgcgagccccaccccagggctccctgggcaagtcacagctgcccaaacctcaggtgctcctggctgtaaagcagagaggagacagctctgcttcaaccctggcacatccctggactggcaccttggggatcgaggtgggtattgactcaagacaagcatattttgtcaaaagcataatggaggtttcacttgtacacctgggcagactccactgactgggtaacaattaactttattatcagtagtaactgtcagtttcaaccagcagcagttatcgctcccaccctttgagggtgggggccccgtggctaatgctgtctttaagaatacacatctgtgtacttcctgtttcttagctgagagaggaggcctcaacaatataaagcgcagggagctggggagcggcaagccagtgggaatgggcacctggccataagtcagagaaggggaaggagagttactttattctcttctggtgccagtaagaactttatcaaggtactagtgccatcagctcctgcccaagggcacccagggccccaggtcagcatgacggatttaagacacattacgttctgggaagacggctaggaaggtaggtcagccccacaggggagaggacactgcatgtccagatgggggcacgcaaaatgatacctccaccctctaagccctggaatctgtgaatgtgacctcacttgataaaagggcctttgcacatgtaattaaactaaggatatcaaaatgagattatcctaggtttcaggcgggtcctaccttcaacgacaatccaacctcttacaacataaaaacagggagattggagacagacatggggagaaggccatgtgaagacggaggcaggaactcctgtgatgcggccacaagccacagagggcctggagccaccaggagctggaagaggcaggagggatcctcccctagcacctgtgaagggaacagggtcctgcccacacctttatttttgacttttggcctccagaattgtaacgaatacatttctgttgtttgaagccatgcagtgtgtataaatttgctactgcggtcaggccgggcgcggtggctcacgcctgtaatcccagcactttgggaggccgaggcgggaagatcacgaggtcaggagatcgagaccatcctggctaacatggtgaaaccgcatctctaccaaaaataaaaaaaattaaaaaataaaatttttactgcagtcacaaagaactagtacactgcccttcttggtggtgggtcccgggctctccgaggtcccccagggtcaaggttggctttctgataccagtcctaggctgctggagaagagcccactgagaaagaattttcgcctgattacctgagctcaggccacctagggaacaaagagaactttattaagttgtagaggctgcacagaaactggcaggtggggtgcaggcaaagctggagagaacaggagcttcctctcagggcccagcccgggtgggggtgggggaagctctcctgtcccatggggatgacttcacagcccttgcatgtgacccttgggtccagtatcgatccccaccactgcttccctggtgcgcacagccagcccgacccctggatctgtttcagttgaaaatttgacttctgaagacttttcaaaggccgggcgcagtggcttatgcctgtaatcccagcagtttgggagacgggcggatcacctgaggtctggagtttgagaccagcctgaccaaaatggagaaaccccgtctctactaaaaatagaaaattagctgggcgtggtggcgcatgcctgtaaactcagctactcaggaggctgaggcaggagaatcgcttgaacccaggaggcggaggctgtggtgagccgagattatgccattgcactccagcctgggcaacaagaacgaaactccgtctcaaaaaaaaaaaaaaaaaaaaaaagacttttgcggcaggatcagaattttcaagagccatacactgaggatggccttagccatggcatccagaccctttatttataagagaaatgaaatatttggatatagttaaagcactttaaacttttttttttttttttgagacggagtttagctcttgttgcctaggctggagtgcaatggcaccatctcggctcaccccaacctccgcctcccgggttcaagcgattctcctgcctcagcctcccgagtagctgggattacaggcatgtgccaccacgcccggctaattttgtatttttagtagagacagggtttctccatgttggtcaggctggtctcaaactcctgacctcaggtgatccgccagcctcagcctcccaaagtgctgggattataggcgggagccaccgcgcccggcccagcactttaaacttttgttttcatacccttgatccccatttccttggacacgtgctgtgggccccgcccgctgccctgatcactagccaggttatcagcccaggggacgggttacattctcaaataacctagcaagaggcctgctggagggcagcaggggaaaatggaagacccgaatctttagacaagtctattttcagactcgctcctttctctaccaaacctgagctgcttccgattctccttctctcttccccaaactgggctctaacccccgtcctctgaatccatgcccggggaaggtggctacgggcactggccctgtcgggggctgcctactcacccgccgcgggaggggccaggtcagcagggcggcgacaggaagaaatgcgggggcgggggcacgggcgggggcgggggaaaggcggacagcggccatgggtcgcgggtctcgggggccgccagcaggctgaagggagagggtcgcgcgggcagcggcggcagcggatgcgggggcggctcggagaccaggggcgggcggccgcgcgcgcccacgggcccgggggctgcggcgacggcggcctcgggcagcggaggcagcggcaggtgcgcgggcggcggcgcgggcgcgggcaggcgcggcaggtcctgcagtgcgagcacggcggcggggagcgcgggtgagcaggcttcgggcggcagctcgggcagtgccagatgcgcgccggggccccagggcgccagcggctcgggccgcagcgggagcgcgggcagcggtggcagctcggccagggcgagagcggagggcggcggcggcccggggctcaggccgggcggcaggccgggcaacggcgggtgcggcagggacggcgggggcagcggggtgggcggcagcgtcgagcgggcccggcccaatcgcgagtgggcgcgggcgcgggcgagccgcgggtgcgagctggagcggggcagccgcgccgccagcttggctgcggccgccaccccggttgcggccgccagcccagggccccagagcgcgccgccagccgtgacctggtacctcgggaggtggccaagcgccgcactccgagcggcccagccaatcgcagatgctcgccgccgcaccccaaccaatcacgggccagtgcgctcgcggtctacgggtcccacccggcagctgtcaagggctacccttggcagccaatcagagatatgagcgcgctccgccaagttcttcttcccgccctctcctggtcccagccaatcgctgtgtcccaggtgccgcagctgctccccgccctcagctagcctggctatcaggcgctgcacacgcgcagtgggcgcccccacctggcttgaggatctgcggattcgctgcgacaccgaggcgcggcgcctcaccaattttttttttgtttgttttttaggtggcttttttggggactgagcccctcactctggcgcccaggctacattgcagtggcgcggtcttggctcagtgaagcctcgacctgccggactaaagcagttctcccgcctcagcctccccaagtagccgggactacaggtgcacgccaccacacccggctaattattatggtctttaaatttaaaaaaaaaattttttttagacggagtctcgctctatcccccaggctggagtgcattggcgcagtctcagctgcaacctccgcctcctggttcaaacgagtctcctgcctcagcctcctgagcagatgggattacgggcgcccgccaccatgcccggctaatttttgtgtttttagtagagacggggtttcgccatgttggccaggctggtctcgaactcatgacctcatgatgcacccgcctcggcgtgccaaagtgctgggattacaggcgtgagccaccgcgcccggcctaattattatattttgtgtagagatggagtctcaccatgttgcccaggctggtctcgaactcctgggctcaagcgatccgccggcctcagtcttccaaagtgctgggattccaggcatgacccaccgcgcccgccccccgacgccaccgatgtggagtgtgagattgtcctctcgttgctgtttacccattgcaactcaggtatgaggatcctgtgtggatgggtcaaggtgcacagatttccattcagttatcttataagaaagataaaacgatatcacaattcaaaagtaaagtttggtgataatatacttagcatttgtgttaaagttcctaagaacaattgtaaatgacagatgggtgcgaatctggtagctcagaacaaaaaggataaaatggtcaatctattcaaaattggaatatagaaactttttttttttttttttgagacaggatcttgctctttcgcccatgctggagtgcagtagtgccatcatggctcactgcagcctcgatctcctcggctcaagtaatcctctcacctcagcctcccaagtagctgagactacaggcatgcgccaccctgccaggctaagttttttatttgtggagatgggagtcgccgggtgcggtggctcacgcctgtaatcacagcactttgggaggccgaggcgggcggatcacgaggtcaggaggagatccagaccatcctggctaacatggtgaaaccccgactctactaaaagtacaaaaacttagctgggcaggcgcctgtagtcccagctacttgggaggctgaggaaggagaatggcatgaacccgggagggggagcttgcagtgagccgagattgcgccactgcactctagcctgggcgacagagcgagactccgtctcaaaaaaaaaaaaaagagagagagaatcaagagagtcaagtcgattatgtttctaattgttgtttgagatgtctaaggctatttcgttaatcaggcatttaaggcacgcaaaatatttagggaaaagtcgagttgtgaaattcgtatttgtttttatttacttatttattttttatagagatgggggtctcactatattgcccaggctggtctttaaattgtaggctcaagcaatcctcctgccttggcctcccaaaatactgggattacaggcgtgacccaccatgcctggccgagctgtgaaatttataaactaattaagcattcatcaaagattgtgaaagtgagttttacatccaaattattagtcaatacaatatctggaaggccactataaaagcttaaggaaaatgagatttttatctaacaactttaataaatcgattataaatgaaaacacaaagaatgaagtgttcttttccatgcacaaggcccctaacttggatgtggttcccccgctaggcggtcaccaagtgatgccctccctgagggcaggcgttgatcgagtctgttttcttctcatgatttctcctgttgggaacatggtccctggcacatggcctcattgatgtttgccaaatgaatgaatgaggtgctgggtggtggctgcaggcccatgccactcccaccctggtcagcaagccccttgcatggcacgcggaggcaagcagggaagcacgtttgtggttctagcatggaggagacccccggccaggcagcaccagaggccaagcccaagggtctgtcttccttgctgggcaggcgaggggcattgcagtgctcagcatttccccagagggcagcggcctgggaagacatagagctgggctagggaggggcggggccctggtgaggccttgccccctcctcccctcccagggacctgagcttctggggtcagtcactcagcagccacctacaggtggcagaacctgctatccttcccaagggctgggtgtcccccagtatggctggaggggtgaccacggggggcctttgggcaggcggctcggccattgcgcctccctctcacctccgtagccattccccagctggccattgctgcctctcttcacgtcggggccccctgtggcacagacagacagaccaggagcactcgggtcaccagagagcttccgtccaccccagcttcaacccaggctgtgggagacaccccctccccggagggcccagggctcagctctgcctcagtttctcagaggaccggggggagagggacagagtatggagaactgagtccgtgatggccctcgttcccaactccatcacctccccttcttggtccagtgtctgggctggctctcagggtcccgggctcttctggcctctcctccagctccattccttcctgctccttcctgcctatgccctcctggcctcttctcactcactccatcccctccgccaagagggctgtaccttctatctctgtggggctgtgggtagacctgggcccagggcccagttccctgaagccacctctaatggccccaacacactcatccaggcatcccgttacctggctggctcctggcctcagcatattcatctccagcctgatatccaggcttcaagccggccccccaggcctggagggtgggccagcgagagttccacagcaccccggcctgccctgtggggaggagagctggcaggggtacccttgcccacaggagctgggacccctggcccctgttgggcttggctctgctcccagaaggctcatttcttaccatttccttcaggggctagagctgctgctttggggtacaccagagcttccaccccatcccctccaagagactctggtcattcccgcctagcccctgggctgttgtctcccccactccactgcactttgtcccctgggtctgactcactattcctaaaaccattggccccatggaaccctggaggaggaaagagggtgtcagaggctgggctggggccctgagcccaactctcccaccccgacccctgctccccaggcacctggctgtgggtgggcctcggggaagaccctggctcccaggacaccattcccataacctaaacctgcaggacagagattggagaggagctagggacaggctagtggaacagggacagcatcaggagggccaggtgaccagctcatagacagggggatgcggacagacagactgactcaggcatgagggagatgccagcttccgctcaacatgggtcgggggcccaggaggactcaccaattttctgtggctcgaggccaccattaaaacctgggggagagaaaactgtgactcagagatgggggtcagcgagagccacagccctggcctcccctcttcctgggatggcagaaggaagaggagggaagaggaagggaagggaggggaggaactccaggaagggcctcctcacctggttctgctcccggtccatagccatttggaggctggtgccctgtgaggagaaaggaagtcagtgcgggggacccaggtctcccctgactccttggaggccaaagatcgaccttagggactctgaaggggaagcagagacttttcctgtccacagggaatggaaccagaagaaatctggagagcagcaagagactgggcgcagtggctcacgcctgtaatcccagcactttgggaggctgaggtgggctgatcacttgaagccaggagtttgagaccagcctgtccaatgtgacaaaaccccgactctacaaaaatacaaagattagccaggtatggtggtgcgtgcctgtaatgccaactacttgggaggcgtattttgcagtgagccaaaattgcaccactgcattccagcctgggcgacagagcgagactgtctcaaaaaaaaaaaaaaaaaaaaaaaaagagcaagagggtagactcggggagggacttcctggccttcgggtgcctgaatagcttaggcagcctagggaaaaagggtgatggaggggtgaccctgatctggggtggagacagaggatagacctagctgagagtttgtccctctgggatgtggggcctgggggcagacagactcacacctgctttctgaggtttcagtccccactggatggctggcattggtgctaggaggaaggttaggggcaggagtgagcccagccgagggcttgagagactgcagatgccatggggcagggatggaaaggactcccatactggggaccacatggggtcccagggccagagttcaggcttctcctcagcagatcactgtgtgacaagtcactgccctctctgagccttggcatccgaggacagagtgggatatggcagccaggccctgaccctcatagggccaggtgcttcccagtgccccctaggcacccccactccacactgacctggtaacttgccattctgcactgcggaagggggctgggatttcaggccccagccaccctctttgtccgaagggacccctggagtgggaagcctggggaggagcatcggagcgaccctcgcattgcagggacctacgatgggaaggaagggaggggtggggctatgctccaggccagtcctcaccgacgccacccaggaggccttggcctggccaagccaccggcctgtagtggcttctagggcagacccagcaccttagggggacattagccaggctggaaaaagcccagctcccttggtccacactctcctggggggacctggggatccaggcaggggatagagggatgtagggatctggcagggatggggctcctgatggaggcccctccgtcttccagcagcctccctctcccttcctcctgggcccccacccctggtcccagtggcctcacctggccagggcccattttcatggccgtgtcctggagagggaaagcagagatgagtgtggcaacactgggggcagaggctagaagggctgagaggcagaaggaggtgtggggcagagccaggggtcccccactcacctgacttctgaggcttcaaggtccctcgcaggcctggggagagacagaaagaggccagttcagacatcagcccacccgaggagtgtagtgaacccctctctcccctgctgatccccctagccccgtcttttcacctggcaggagccccagccaggtccctggtgtgtatcctgggagggagagcagggcatgagggcggggttggagtgggggaccttggagaaggcaggaagaggggcagagagcaactcggctttggaggtttctggctctctcccaggccagagacccatggagaataatggacaggcccaccccaccccaccccttcccccactgagacccaactctgtccgttggagcctgtcctccttcccctctgctccaggtcccacccacctccctcacctggctgggctccttcccacaggaaggctccagctccagcccgttcttgcaccatggggagacagggtacagcttgggaggggaaaagggtggaggggtaggcagtttctgcaggtagggagagtgaggagtgggaagggcttacctggcttctgaggtttcatgccctctccagcacctggagagatgcgagtaggtgagggacccatgcccactcctcactgaggggtctcttccagacctggcatctgtcccccacctggtgcccatgccaacctccccttcctggtccatgaccagtgggaactgcagggtctgtgggggcggcatggggagaggttggggtacagaagggggctggagcctggcccccctttcctcccaatttaggaactggagctcccagcacctccctcccccttgtgccgcctcctctccagactctaccccgtctaaggctgcaggagcccccaagaaaaccctcagtacagggtcaggggagagccaggcccccacctctttcctcctttctgcactcccagcaactccagccccccagtacctgctctgtagccattctgggctaaggggcctgtggggagggaggggtgagcagggggtttgggattctagctaaggagagggcgaagggccttt

SEQ ID NO: 77 - DNA, 986 bp, Homo sapiens
  Genbank Accession No. AF191148
cagacagcggcgggcgcaggacgtgcactatggctcggggctcgctgcgccggttgctgcggctcctcgtgctggggctctggctggcgttgctgcgctccgtggccggggagcaagcgccaggcaccgccccctgctcccgcggcagctcctggagcgcggacctggacaagtgcatggactgcgcgtcttgcagggcgcgaccgcacagcgacttctgcctgggctgcgctgcagcacctcctgcccccttccggctgctttggcccatccttgggggcgctctgagcctgaccttcgtgctggggctgctttctggctttttggtctggagacgatgccgcaggagagagaagttcaccacccccatagaggagaccggcggagagggctgcccagctgtggcgctgatccagtgacaatgtgccccctgccagccggggctcgcccactcatcattcattcatccattctagagccagtctctgcctcccagacgcggcgggagccaagctcctccaaccacaaggggggtggggggcggtgaatcacctccgaggcctgggtccagggttcaggggaaccttccaaggtgtctggttgccctgcctctggctccagaacagaaagggagcctcacgctggctcacacaaaacagctgacactgactaaggaactgcagcatttgcacaggggaggggggtgccctccttcctagaggccctgggggccaggctgacttggggggcagacttgacactaggccccactcactcagatgtcctgaaattccaccacgggggtcaccctggggggttagggacctatttttaacactagggggctggcccactaggagggctggccctaagatacagacccccccaactccccaaagcggggaggagatatttattttggggagagtttggaggggagggagaatttattaataaaagaatctttaactttaaaaaaaaaaaaa

SEQ ID NO: 78 - DNA, 1822 bp, Homo sapiens
  Genbank Accession No. D84342
ccgggtgaaagcagagtgctccctgaccctctgcccctccctcctccaccctggcctgctttagctttccccagacatggccaacaagggtccttcctatggcatgagccgcgaagtgcagtccaaaatcgagaagaagtatgacgaggagctggaggagcggctggtggagtggatcatagtgcagtgtggccctgatgtgggccgcccagaccgtgggcgcttgggcttccaggtctggctgaagaatggcgtggtgagtggcaccctgggctagggcgctggggggctggggtgtgaccccctgtgagtcctgggccaatccctgaggactgctaagctgcgtcctatgccctatgcctggtagattctgagcaagctggtgaacagcctgtaccctgatggctccaagccggtgaaggtgcccgagaacccaccctccatggtcttcaagcagatggagcaggtggctcagttcctgaaggcggctgaggactatggggtcatcaagactgacatgttccagactgttgacctctttgaaggtagagaggagaatgctgggggaggaggtgggcaggaggacagggtgctgggacagggagagggtatgaccaaatatgccacaactaggggtgtgctcgcccgcacacagcagggatgggatatgccgagaataacacgccacgctcacagggcccactgagaggcctcccttgaattggggacaactcttggccctggtttggccatttttttgtgagagacgggggcaggccctggcttggagtcttgtttatacgttcttgatgttcatctcctctctcctgtcttctcacaggcaaagacatggcagcagtgcagaggaccctgatggctttgggcagcttggcagtgaccaagaatgatgggcactaccgtggagatcccaactggtttatgaagtatgtggcccccagggagcttgagtctccgcatggggtgggaggtggcttgttctaaggagcttgcgggaaggattaggggaagcagatagccaagaaaggataaagtgagggtctgggatggggaataatgggtccttaatactccttgacccctccctttccaccctcctgcgctcagtctccctagcctatgaggcaagctagattagggaaaaaaagtgcaacaggaaggcaatgggattgggctaggacgtaacagagggatcagaaaacgggtggaaaacacacagttctaccaagtctttatcctgcttcctcctcttctaggaaagcgcaggagcataagagggaattcacagagagccagctgcaggagggaaagcatgtcattggccttcagatgggcagcaacagaggggcctcccaggccggcatgacaggctacggacgacctcggcagatcatcagttagagcggagagggctagccctgagcccggccctcccccagctccttggctgcagccatcccgcttagcctgcctcacccacacccgtgtggtaccttcagccctggccaagctttgaggctctgtcactgagcaatggtaactgcacctgggcagctcctccctgtgcccccagcctcagcccaacttcttacccgaaagcatcactgccttggcccctccctcccggctgcccccatcacctctactgtctcctccctgggctaagcaggggagaagcgggctgggggtagcctggatgtgggccaagtccactgtcctccttggcggcaaaagcccattgaagaagaaccagcccagcctgccccctatcttgtcctggaatatttttggggttggaactctc

SEQ ID NO: 79 - DNA, 1083 bp, Homo sapiens
  Genbank Accession No. M95787
atcctgtctgtccgaacccagacacaagtcttcactccttcctgcgagccctgaggaagccttctttccccagacatggccaacaagggtccttcctatggcatgagccgcgaagtgcagtccaaaatcgagaagaagtatgacgaggagctggaggagcggctggtggagtggatcatagtgcagtgtggccctgatgtgggccgcccagaccgtgggcccttgggcttccaggtgtggctgaagaatggcgtgattctgagcaagctggtgaacagcctgtaccctgatggctccaagccggtgaaggtgcccgagaacccaccctccatggtcttcaagcagatggagcaggtggctcagttcctgaaggcggctgaggactctggggtcatcaagactgacatgttccagactgttgacctctttgaaggcaaagacatggcagcagtgcagaggaccctgatggctttgggcagcttggcagtgaccaagaatgatgggcactaccgtggagatcccaactggtttatgaagaaagcgcaggagcataagagggaattcacagagagccagctgcaggagggaaagcatgtcattggccttcagatgggcagcaacagaggggcctcccaggccggcatgacaggctacggacgacctcggcagatcatcagttagagcggagagggctagccctgagcccggcgctcccccagctccttggctgcagccatcccgcttagcctgcctcacccacacccgtgtggtaccttcagccctggccaagctttgaggctctgtcactgagcaatggtaactgcacctgggcagctcctccctgtgcccccagcctcagcccaacttcttacccgaaagcatcactgccttggcccctccctcccggcggcccccatcacctctactgtctcctccctgggctaagcaggggagaagcgggctgggggtagcctggatgtgggcgaagtccactgtcctccttggcggcaaaagcccattgaagaagaaccagcccagcctgccccctatcttgtacctggaatatttttggggttggaactc

SEQ ID NO: 80 - DNA, 1056 bp, Homo sapiens
  Genbank Accession No. D17409
tcttcactccttcctgcgagccctgaggaagccttctttccccagacatggccaacaagggtccttcctatggcatgagccgcgaagtgcagtccaaaatcgagaagaagtatgacgaggagctggaggagcggctggtggagtggatcatagtgcagtgtggccctgatgtgggccgcccagaccgtgggcgcttgggcttccaggtctggctgaagaatggcgtgattctgagcaagctggtgaacagcctgtaccctgatggctccaagccggtgaaggtgcccgagaacccaccctccatggtcttcaagcagatggagcaggtggctcagttcctgaaggcggctgaggactatggggtcatcaagactgacatgttccagactgttgacctctttgaaggcaaagacatggcagcagtgcagaggaccctgatggctttgggcagcttggcagtgaccaagaatgatgggcactaccgtggagatcccaactggtttatgaagaaagcgcaggagcataagagggaattcacagagagccagctgcaggagggaaagcatgtcattggccttcagatgggcagcaacagaggggcctcccaggccggcatgacaggctacggacgacctcggcagatcatcagttagagcggagagggctagccctgagcccggccctcccccagctccttggctgcagccatcccgcttagcctgcctcacccacacccgtgtggtaccttcagccctggccaagctttgaggctctgtcactgagcaatggtaactgcacctgggcagctcctccctgtgcccccagcctcagcccaacttcttacccgaaagcatcactgccttggcccctccctcccggctgcccccatcacctctactgtctcctccctgggctaagcaggggagaagcgggctgggggtagcctggatgtgggccaagtccactgtcctccttggcggcaaaagcccattgaagaagaaccagcccagcctgccccctatcttgtcctggaatatttttggggttggaactctc

SEQ ID NO: 81 - DNA, 3950 bp, Homo sapiens
  Genbank Accession No. AF166125
gtacatcagccctgaggagttcaaacccattgctgagaagctaacagggtcaactcccgcggccagctacgaggaggaggagttgccccctgaccctagcgaggagacgctcaccatagaagcccgattccagcctctgctcccggagaccatgaccaagagcaaagatggcttcctaggggtctcccgcctcgccctgtccggcctccgaaactggacagccgccgcctcaccaagtgcagtgtttgccacccgccacttccagcccttccttcccccgccaggccaggagctgggtgagccctggtggatcatccccagtgagctgagcatgttcactggctacctgtccaacaaccgcttctatccaccgccgcccaagagcaaggaggtcatcatccaccggctcctgagcatgttccaccctcggccctttgtgaagacccgctttgcccctcagggagctgtggcctgcctgactgccatcagcgacttctactacactgtgatgttccggatccatgccgagttccagctcagtgagccgcccgacttccccttttggttctcccctgctcagttcaccggccacatcatcctctccaaagacgccacccacgtccgcgacttccggctcttcgtgcccaaccacaggtctctgaatgtggacatggagtggctttacggggccagtgaaagcagcaacatggaggtggacatcggctacataccccagatggagctggaggccacgggcccctctgtgccctccgtgatcctggatgaggatggcagcatgatcgacagccacctgccctcaggggagcccctgcagtttgtgtttgaggagatcaagtggcagcaggagctgagctgggaggaggctgcccggcgcctggaggtggccatgtaccccttcaagaaggtctcctacttgccgttcactgaggccttcgaccgagccaaggctgagaacaagctggtgcactcaatcctgctgtggggggccctggatgaccagtcctgctgaggttcagggcggactctccgggagactgtcctggaaagttcgcccatcctcaccctgctcaacgagagcttcatcagcacctggtccctggtgaaggagctggaggaactgcagaacaaacaggagaactcgtcccaccagaagctggctggcctgcacctggagaagtacagcttccccgtggagatgatgatctgcctgcccaatggcaccgtggtccatcacatcaatgccaactacttcttggacatcacctccgtgaagcccgaggaaatcgagagcaatctcttcagcttctcatccacctttgaagacccgtccacggccacctacatgcagttcctgaaggagggactccggcgtggcctgcccctcctccagccctagagtgcctggacgggatctgatgcacaggcccccacgcctcagagccagagtggtcctcagcccatttcagactgcagatgccgcccactcccaccccactcctaggctgccttggagggtacaagatccactgagggtggccaccacagccttggctccatggtggcgggtagacaagggatgcctgggctgactgggcagaggaacctctagctctgactgtcactcggctctccctacccatttggctctggaagctgcttggcccccccagatcagggcctgggtgaactccctggacctttcctagccagccgcacagtctaggcccttgtggggtgaagaatggagggaggagcaggctaggaagacggggccaccaccctctccttgctttcagcccttcccacaggaaacatcaagaagccccagccaggaggggccaggctgccaaggcggctcccctgtttatctagagccttcgttcctggccataccccggactgccctcctgtgcctgatgtccccagctggggtcagtctcaacaggagccagtcttctggagcctctgggcagaaccctccatcagagtggaaatcagacgggaccccctgcagcttccctgaccacgccactgaccagctatctggggaagtttactgtgaaggggtttctgcctttagcaatggggttcactaagggggttcccgaggcccagggccaaggcactcccaccgcctaccttagcacagggtctctgcaggactgcgggagccagcgctcctgccgcccctcttgcccctcagaccttgcatccacagaagcacaacccagccaaacaccacagccttctccagagccggcactgtcccggcaaccaggggtgccccaggctagctcttctacctctggggcaccacggactccccttggccactcttgggactttggtccacgtcctgagccactgaccacggccagtctctctttttatatgtgcagaaaagtgtttttacacaaactttctcatggtttgtaggtatttttttataaccccagtgctgaggagaaaggaggggcagtggcttccccggcagcagccccatgatggctgaatccgaaatcctcgatgggtccagcttgatgtctttgcagctgcacctatgggaagaagtagtcctctcttccttctcctcttcagctttttaaaaacagtcctcagaggatccatgatccccagcactgtcccatcctccacaaaggcccacaggcatgcctgtactctctttcattaaggtcttgaagtcaggctgccccctccccagcccccagttctctccccaccccctcaccccacccggggctcactcagcctggcagaggaagaaggaaggcagacatctccgcagccactcctgggccttttatgtgccgagttaccccacttgccttgggcgtgtccactgagccttccccagccagtcttgttctcaattttgttttgttttgttttgttttgagacggagtcttgctctgtcacccaggctggagtgctatggctcgatcttggctcactgcaacctccacctcccaggttcaagcaattctcttgccccagcctcccgagtagctgggattacaggtgcatgccaccatggctggctaatttttgtatttttagtagagatggggtttcaccatattggtcaggctgatctggaactcctgacctcaggtgatccacctgcctcagcctcccaaagtgctgggattacaggcgtgagcaatcgtgcccagccttgttcttaattttgtatcatccagtcatcgctaatattacacgcaccttctcacttaatcctcacgacaagcctgtgaggcagatgctcattgttcccatcttgatgaaacttgagtctcagggaagtgaagtgacttgcccagggtcactcaggtagagttgagattcaaacccacatgtggctccaaagtctgcatctggatttgggggtgttttttggcatggcaccctcacctctctccctgcctgttttccccaaagtggaaaggaaggcctttcaaaccagagtgtctcactcccctctgacctccagaccagatggggcatgagccagccagctcagccaggctccctgtgtcctgggaggaagtgtccccatcccccatgccccttatggggagggagggcgtctgatgctctctctctgcctcccccccatcctgtcaggcacaggtgacgggggcagcccatgcgagcccttctcctgctgctctgggagggccagttccacattgagccagcctggtcccatggaaaatgatggcctgggctttctgaggccttatctgatgcctctgcagttcatgtcccccaccaggcctcgaggctcagggtgggagagggccccgggctgccctgtcactcctctaacacttccctcccctatccccaacatgccctgtaataaaattagagaagactaaaaaaaaaaaaaaaaaaaaaaaaaaaa

SEQ ID NO: 82 - DNA, 2085 bp, Homo sapiens
  Genbank Accession No. AL110205
caggaggggccaggctgccaaggcggctcccctgtttatctagagccttcgttcctggccataccccggactgccctcctgtgcctgatgtccccagctggggtcagtctcaacaggagccagtcttctggagcctctgggcagaaccctccatcagagtggaaatcagacgggaccccctgcagcttccctgaccacgccactgaccagctatctggggaagtttactgtgaaggggtttctgcctttagcaatggggttcactaagggggttcccgaggcccagggccaaggcactcccaccgcctaccttagcacagggtctctgcaggactgcgggagccagcgctcctgccgcccctcttgcccctcagaccttgcatccacagaagcacaacccagccaaacaccacagccttctccagagccggcactgtcccggcaaccaggggtgccccaggctagctcttctacctctggggcaccacggactccccttggccactcttgggactttggtccacgtcctgagccactgaccacggccagtctctctttttatatgtgcagaaaagtgtttttacacaaactttctcatggtttgtaggtatttttttataaccccagtgctgaggagaaaggaggggcagtggcttccccggcagcagccccatgatggctgaatccgaaatcctcgatgggtccagcttgatgtctttgcagctgcacctatgggaagaagtagtcctctcttccttctcctcttcagctttttaaaaacagtcctcagaggatccatgatccccagcactgtcccatcctccacaaaggcccacaggcatgcctgtactctctttcattaaggtcttgaagtcaggctgccccctccccagcccccagttctctccccaccccctcaccccacccggggctcactcagcctggcagaggaagaaggaaggcagacatctccgcagccactcctgggccttttatgtgccgagttaccccacttgccttgggcgtgtccactgagccttccccagccagtcttgttctcaattttgttttgttttgttttgagacggagtcttgctctgtcacccaggctggagtgctatggctcgatcttggctcactgcaacctccacctcccaggttcaagcaattctcttgcctcagcctcccgagtagctgggattacaggtgcatgccaccatggctggctaatttttgtatttttagtagagatggggtttcaccatattggtcaggctgatctggaacttctgacctcaggtgatccacctgcctcagcctcccaaagtgctgggattacaggcgtgagcaatcgtgcccagccttgttcttaattttgtatcatccagtcatcgctaatattacacgcaccttctcacttaatcctcacgacaagcctgtgaggcagatgctcattgttcccatcttgatgaaacttgagtctcagggaagtgaagtgacttgcccagggtcactcaggtagagttgagattcaaacccacatgtggctccaaagtctgcatctggatttgggggtgttttttggcatggcaccctcacctctctccctgcctgttttccccaaagtggaaaggaaggcctttcaaaccagagtgtctcactcccctctgacctccagaccagatggggcatgagccagccagctcagccaggctccctgtgtcctgggaggaagtgtccccatcccccatgccccttatggggagggagggcgtctgatgctctctctctgcctccccccccatcctgtcaggcacaggtgacgggggcagcccatgcgagcccttctcctgctgctctgggagggccagttccacattgagccagcctggtcccatggaaaatgatggcctgggctttctgaggccttatctgatgcctctgcagttcatgtcccccaccaggcctcgaggctcagggtgggagagggccccgggctgccctgtcactcctctaacacttccctcccctgtccccaacatgccctgtaataaaattagagaagactaaaaaaaaaaaaaaaaa

SEQ ID NO: 83 - DNA, 100301 bp, Homo sapiens
  Genbank Accession No. AL020996
gatcatcctatccagatagtgggaacgcagatgtcccccagcctgtgtgagctctgggaattgctcagcttgcaattccagtttgcagtttcattgcctggctttgtggggtttcacctaatacatgtgtaggttagtattcagtaatggactaaagggatccctatgcagaggtctcccttctggaggtctttctctgcactgcaaatctcagccacctcagtttccacaaattccaatctcagtctactcaattcctgaagaaagatacattgtggtctgcaaagcacttctgggcagaaagctggaatgatcacagggctcaccttatttgtttcccttttctcaaggatcacaattctttactgcctgttgtctgctgtttatatcaattttttcatgtatctttgatccagttttctagttgtatgtggtggaagagaagattctgtaccagcaacacaacatgttgaagtatgaatttacccccatgatttctttctttttttaaccacttaaagtacaacttagtttccaaatgtaaaaatgaagtcaactttgagttagaataaataactcggcttcaagattcaggcctacctctaacttgctgcatgaatagtggcaaatcttacttgttttttggcagacacagcaaaattgaattgaatataatcctatttgccctacttctcaggcattctttaacaagcaaatggaaataaaaacaaatcacattaaataaggatgaggttatatttatagttagttgacaactcacttttcaaacctctcttgcctatcttccagttccattctctaaagaataaaagcgcctgagttaaaagtgtagtgagactggtgctgttccactgctcctcctcttaatattagccaactgctactgaatgttttctatgtgccgggaactgtgtaagccttttatgtgaataaatttactaaattttcttttttccttttttttttttgaaacggagtcttgctctgtcgcccaggctggagtgcagtggcacaatctcggctcattgcaacctccgcctccctggttaaagcgattcttctgcctcagcctcccaagtagctggggctacaggcgcttgccaccacgcctggctaatttttgtatttttagtagagacagggtttcaccatattggccaggctggtcttgaactcctgacctcgtgatccacccgcctcggcctcccaaagtgttgggattacaggtgtgagccaccacgcctggccttactaaattttcataactgccatatggataggtactattattgtcatttgacacctaagaatgagattaagcaacttggagaaggtcacatagcaaagtggcagtggcagaactaggactgatttttttttttttttgtatttttagtagagacggggtttcgccatgttggtcaggctagtctcgaactcctgacctccttatctgcccgcctcagcctcccaaagtgctgggattacaggcgtgagccaccgcgcccggccaaggactgattcttgagccatgctcttaaccaccactatgtgactactttaaaactactgaaaatgcatcaactgctgctgtagaatcattaattatccttaaatataaaagagcatcatctctgccatcctgttaacaaatcctgtttgtttagtcagcctgatttccatggggaagcagaaagattgggctatcattggaatatgtgattcctgagaaaaacaccgttacaatggctggaaatggaagatgatgtccagcaccaactaccttgagaataggctataagtggagtacagaggatctagtgtggttctcagaggatcactggtgtgtactgaatctctactgtatgtcttttaatattaataggctcattattcttttttctctcctttctcagacacatttaatcaaaccaggcaccaaaatgctaacactccttcctggagaaagaaaggctaatatttattttactcaaagaagagctccatctacaggcattcaccagagaagcattgcttccttcttcaccttgcagccaggtatggtgacccatatgggaatacttcattatccagagcaaaaaaggagtgtgttcatttgtccatgttagaccatttatgagaaatggtgaaaccagtgcattgtgttaaacttagcctgttagaagaggttataaaacataagttgttgccttttgaaaagcaatatatgtgtacttttacaaacatacttttctggttctgttttgctcagcttaatattaaatatttgtatttgctgacagagcagtcaggaagggtgtacttgggagttggaggtgcactggggagttgccctgccattagttaggtggtatatatcttgggttggccacagtgggtactctgtctaaggttaattaataattgatacttttgtgtgacgcttctcaaattagtgaaaggttcaaagatgctttttcttagcctcacataaagttggcttatgtctcttcctttggctgttctttgcttccaggtccctgttcaggggagcagctgactcagagcaggctgggccttaaacagcagggttcctgccacttggagggtgttgggaagagtgctctaatgccgggtgtgattctcaggattgctttgcctaaaccttcaaaatgccctctccctcctccaaacaaaaacgtacactcttttgctttatgtaagggcagatttaaaaaaaacaaacaaaaaacccactttttccacttacaaattctggtgtattttatagtctatattgaatgctaaggaaaagttgagaattctcacaaaacctagtttctgcagtataattcttattgtagaaggaaagaggaaatcagttattctgctttgtttttataattagatcttggaacaatttgagccaagttgggaattccatgtcctccatccttatcttaaggcagaacagaatccactctatgcctgataaaattaacaggctggacactagtagttgtttcactattctacctactgattgacttagcatcctaattgtgtcttcactccctttccaatgaaatgcctggggagtggaggacccacgtttttcacactgtcaccagaaggtttctcagagttggatagttaatgtcatctttaagaccttacaaaactagtatgtgtttagcatgtttctttaaggataatgtctaggaatgtatatttgaccaggatcaccatttagtaaaaaaccacattaaataaaaaacaaaagcaaaactgatgtgccgtatgttaaacaaacctacaaatgaaaactcagctggtaaagtaggctatggtctgatcgtatgcgatgtttgactttattaggtaggtgatgggaagtatccatgtatttgagtagggaatataagatctgatgttttagagtttattcatgatagactggcaagattgaaaacaggaagattggctacaaagttatgtgaagagtcttaagactcctgcactaggtagtaatagtagctgatactgatttcagaaaaagccaactgaatcctgcttagggcagtttttctgcagaataatatttgttcattcctgttttattaggaaagacaaatggcagtgaccagaagagtgtttcatctcatacagaaagtcagatcaacaaagagtccaagaaaaatgcgacccagctagaccatttgatcccaggcttagcacacgattgcatggcatcccctttagccacttcaaccactgcagacatccaggaagctggactctctcctcagtccctccagacttctggccaccacagaatgaaaaccccattttcaactgagctatctttgctccagcctgatactccagactgtgctggagatagtcataccccactggctttttccttcaccgaggacttggaaagttcttgtttgctagaccgaaaggaagaaaaaggggattctgccaggaaatgggaatggcttcatgagtctaagaagaactatcagagtatggagaaacacaccaaactacctggggacaaatgctgtcagcccttaggcaagactaaattggaaagaaaggtgtctgccaaagaaaacaggcaggcccctgtcctccttcaaacatacagggaatcctggaatggagaaaacatagaatcagtgaaacaaagccgtagtccagtttctgtgttttcctgggacaatgaaaagaatgacaaggactcctggagtcaacttttcactgaagattctcaaggccagcgggtcattgcccacaacactagagctccttttcaagatgtaaccaataactggaattgggacttagggccgtttcctaacagtccttgggctcagtgccaggaggatgggccaactcaaaatctgaagcctgatttgctctttacccaggactctgaaggtaatcaagttatcagacaccaattctaaatgtttgaagctttgtttctaaaagtaccttgaaatgatagagatgtaggaaaatatagttgtgggtggagagaggagtgagtttgtttaggtgggaaggtggcatgggatgaagttgtcattactgagcatcttctctgtgtaaataaagggcagtaccattgttaagacagtgggattggcatcatggctttccctcaggaaggtggtggctggtaaattccctgaatgagtctatgatgaacactgaggcagcacagtgggtatttatctctatgaaagtgccttttactcagcctgcacagagccatctctttgcccttccagatgtctgactgggaccttgcttatggatgtgtttttttttttttttttttgagatggagtctcgctctgttgccaggctggagtgcagtggtgcgacctcagctcactgcaccctctgtctcccggattcaagcgattctcctgcctcagcctcccgaatagcagggactacaggcatgcgccaccacgcccagctaattttttttggatttttagtagagacgaggtttcaccatattagccaggatggtctccatctcctgacctcctgatccgcccacctcagcctcccaaagtgctgagattacaggcataagccaccgcgcccagccagatgtgtgagcttttaatctctggctgatcttaacccacatcagcctaagcttgggatgattactcttgacccttttttttcagtgattagcaaatctccccacaacccaggtgtggagagaagagaggtagaatggtgctagtttcctattttatttttgtggtaactgtacagcactttaaagttatatactctatgtttaaatatctcccttaaaaagcctgagctgtacaacaatctggatgtgactctgttacccttttcccacaagataggagggaatcccctttgtaaaactatgaatccaaataaatgtttacaaagtggctcttgtgataattggtaattaaaccattaccaattttatttttgaaaaggcaacactgtaatagtatatgctgtcattgccctgagcctgatctgaaccagagtctagtttgacctgtcttctacccaaggcattattccttgttgttgatgtggtatctaagaggcttaaacaacctctaagggacaaacttgcaaggttataagagaactgcttctttttttttttttaacttaaattttatttttttgagacacggtctcgctctcttgcccaggctggagtgtggtggcatgaacacggttcactgcagcctggacctcctgggcgcaagtgattctcccacctcagcctcccgagtagctgaactataggcacatgccaccatgcccagctaattatttttaaaatattttgtagagatgaggtcttgctttgttgcccaggctgatcttgaactcccaaagtgctgtgattagaggtgtgagccactgtgcctggcctaatttaaatgttaaattctacttttatcgtgtatgtcatctctccagtcattttcctggaagacctgcttttaagaatgtatggggcttagtgcggtggctcatgtctgtaatctcaacgctctgggaggctgaggtgggaggtttgcttgagaccaggagtttaagaccagcctgggcaacatagcaagaccccatcgctacaaaaaaatttaaaaatttcctgggtgtggtggtgcatacctgtagtcccagctactcaggaggctaaggtgggaggctcacttgagcccaggagtttggaggctgcagttagctaatgatcccaccactgcactccggcatgacagagctagatactgtttctaaaaaaaagaaaaagagtatagggcaaaatctctacagaaagggggaagaaaccccctagaagggcaggaccttataaggaaagaggagaagccagtagcctgtttaagttcatacaccttaaaattaacaataatcctatgcccctgaaggatactgggtaatcgcaactcaagagatggacacagcaaatgcattctctctccaagtccttcctttaatgtcaggtagtgcttcaacccaaacacaagcagtatacataccatagagaaagggacctgagggcatctgagtcatgcatggtgtggtacatacaaaccttggcccagcccaaaggagcagtcaagggcctggaagaaagatggtttgctctttccccctcctcctctctctttcctaccgggcttaaagtccgtggaagagaaagtttttaatcagtggaactgataaggcctcagggccgtggagggtagatttggttgttcagtaatataaaatgtgtttaagaaaaaaaacagcccaggcttcccagcagtagcccatgtgttggctggttcagcagcctgacctctacatctagacaaggaagtgaggagggtgattgctgggcattggtgtaggtttatgacggagcagcataagattttccgtgccctgtgaacatgtatacaaacattcatagccccttcccctcagccctgctctgctgcaaggaagctgctgagtgagtgacagctgggcacaaagtgtcttgtgagaccagctatagggtctaatgcagtgaagtcagtcatttaggacctattttcacacaggggcaaggaaaaaccagaaacaacttctctcttaccctttaaactaagatacttcattctacacgattacctgaaacaaatgtctcaggtcaaatcacaagccttagcttctgctagggtttgaagtctgggaaatatataatccagctcttctctttcagtccaagctctagcttgtcagcaagactgttgcagaagatctatccttaagaggcagaaacatctgcggtgaggaaggcagctattgaaggtattccaggagcatgagactgagtttgcagagctgagggttgtcaatttccttttctactgatatcttcttcctttagagcaaacttcctccttaggacctcagagataagcacagcagggtcttcctccttcaataaactccggttcctagagacacaataatagcttgagtacttactctttcctgtgtagtgctgtatatcttttgaatacattatctcgttgaatcctcacaacaatcttacgaggtaggtgccattacaattccctttcacagataaggaaattgaagcacagaaaggttatacaagttgcccaaggtcactagtcactcagcaagtaagcggtgaatccagagttcagaaccaaactagctggttccagatctcatctattaactagaatgctttactatttcctgaaatagctataaagtatgggcaaagtaaaggaccatcagtctgttagagttggcctctggtggctaagcttctgccttctggccctgttttcttagtagcatttccccagagggtcagcaggggaagtgactgatgactcttggctattctgacccttgatagttctggagaaaaggtgtgcttgggatttcctaccaccgggtctccccttcaggggagatgattttttatgagagccagaattagagcaaaacattcacataagaaactcatgggaacaaaaccaactccagactgaagtaggcccaagttatctgatacatcatataagagggtcctagatacctggaaaatagttgcttgaaatcctagtgaacttatatacattcatcatgaaggtgttttactggtgattaagctaaatataagagccaagactgactattcaaccttcaaagcaaaaacaagagggactgcgtttggttggtgacatatctgaacctttgctgactggggtactttcccattcttattcactgacccagctccttctgatctgaggacacaagtgggaggagggggctagcaataagggtcttgaatctaatttggtccaaaaggcaagtaagagaaagtttgagagtcaacctataaaacattttgttcagaagaagacagctcagagaagaccaaaaacagcagcaactgaatttgggaatgtggaagaccaaagagatatgggtgagtatgaccaacctgactagggccagtgaaggaaggttaagagtgacttccctaaatgggtcaactgccaggaagcaatgagggagtcacttagcctggtctacttttcagagggaaatggatcccaggagacaaaaagggatccagggcaagtaactttccctttaacaagaactttatcaactcaggagaggacctcgcttccctgtccccaaaacagtttttcatctgcattaacaaacagagctgcacaagctgggtgctggccatcaaggtctggctctcaaatgcccaggaacctgcattcaaaccaagctcctctggtgagtcctgtgcagctgttgaaaccgcaacccacaactggagaaacactatgcaatggggtgactccctgaggcttctttgccagatgaagtttttcaaggtaggtattccccaaagaccctcatactccatcggaaaaacctagagctccactccttggggttctactttagtaagttaaaggtgtatttttaacaaatctgagcaattctgatgggcagctaggtttcggaactactggtgagtctcaaaagccttattctcaaatcactgaatgtgcagggtttgtttgcacaatggaccactgtattttaaagcagaaatctccaactttatgaaattctcctcccaccaaaaaagtctaccaatttgagataagaaaacataacaaaacataatgtcatgcaacccctcactttgaagggtgggccatgaagacactgtcactagcagtatgaggactgaagtggtaaagccacctgaggacagaagttggattagatgagccttcttgtaaaatccctactagcctcatatttggttggggtgaccaaacccaataaatgtagtgttgctctttcctcaaactggggccccaggcactggcaagcaggtagtcagcaagctttatgaatgacataacatatggtactactaagaacttactatgtaagtatgttgcattacataattggccatgggcaactctgagtaaatagataccagagctcctcatcagatacttacagatcttgactctgtttcattcggtgaaagtccttcaggatacccatcatgtctgcaaagctgctggccttggacaaagagacgcagtcatcctcttcagacgaactgcaggcagctttgtgttctggtttgcaacattcagggctggcagaacaaagcagggggactgatggaagctcagggacctccacctctgtctcctcggtgatgtcactaatgacaaaggaagttgtagagtggaatgaggatccaaaacaaggtaagggagaagagacatttgaacttcctggagataagaaatctggcgttaatgaagccgaagctgaaagagaaaacaataggcatgggtggacattggggctagaacacagtagcaatatcttctccccacagccctgcctactgaacattcatttcctgggctgacaccatgacaatctgggagagccaggatggtatctgtagccagtggagggtcattccactatgcttctcactcgggggctcagaaagctgtagaagcactgggcttttccagtgttccaggaaggcaggaaaacccagccccataatggccttggcatttaaaagctcccattccacaataggctgtggagtgacagccctgtcataggccaaagcagcagagataagagctaaggcctgaatttgtccttttctctaactagactagtgcttttgactatgctcctttgaaatcttgctatctgtgaactagaagacatgttctgagcaaaaccagaatggtaacagacctcccaacctccccaaatttcagtggagagaatttcctcagtttttacatttctaaaaatactttaaaaacactaaatacactaaaaactatgtttctaaaaaagatgttacttctgcttgtctcttggatgacaaaaaagtagccaagaaataacaaagtttcagtacaattcttcataaaacttccatgtgaagaaattaaatacatgaagatttcaaagaacaccatgattttcatgtgtcctaccaaatgataaatttcagagctatgactctgagtcaatgcagagtgaaaaaatgaggatgggaggaatatgaagataagccctgagcatcttgggagcgatccacctgttggctgtccatgcctctggttaaggcaggcttcccatccatttccagtggttctgccttaactgtagacagaaagctggaggggtgggttacagggcttgtttgcataatagaccactgttttttttttttctttttttgagacggagtctcactctgtcgcccatgctggagtgcagtggtgcaacttcagctcattgcaacctccacctctgcctccacctccaccttccaggttcaaggcacatgctgcgatgcccagctaatttttgtattttttatagagacagggtttcaccatgttggccaggctggtctcgaactcctgacctcaggtgatccacccacctcagccttccaaagtgttgggattacaggcgtaagccacagtgcccgaccactgtattttaaggccaagatctccaactttatgaaattctccttccaccaaaaaagtccaccaatttgagataagaaaacataacataatgtcatgaaactccccactttgaagggtggggcatggggacaatgtcactagcagtataagaactgaagtggtaaagccacttgtgattcctggtagaaacaacaaggcaagggaagataggtgcttaaaaagggtaagtctcagtggtggtggggggaatgtttacttcttgtattgaaaaggaaagcagggcgcggtggctcatggttgtaatcctagcattttgggaggctgaggcaagtggattgcttgagctcaggagtttgagaccagcctgggcaatggcgaaaccctatctctactaaaaatacaaaaaattagctgggcatggtggcatgcgcctataatcccagctactcgggaggcagaggcacgagaactgcttgaacccaggaggtggaggttgcagtgagccaagatcgtgccaccgcactccaacctgggtgacagaatgagactcttgtttcaaccgcgggcacagtggctcatgcctataatcttagcactttggaaggccgagctgggtggattgcttgaggccaggagtttgagaccagcctgattaatgtggcaaaaccccgtctctactaaaaataaaaaaattagccaggtgtggtggtgcacacccgtaattccagctactcaggaggctgaggcacgagaatcgcttgagcctgggaggcagaggttgcagtgagccaagattgcgccactgcactccagcctgggcaacagagcaagaaccaggaccctgtctccaaaaaaaggaaaactggctgggctcggtggctcacacctataatcccagcactttgagaggctgaggtgggtgggtcatctgaggtcaggaatacaagaccagcctggccaacatggtggaactctgtctctactaaaaatataaaaattagccaggcctggtggcacacccctgtagtcccagctactcaggaggctgaggcaggagaatcgcttgcacctgggaggcagagtgcagtgaactaagatcgtgccactgcacttccagcctgggcgacagagcaagactcactcagaggagaaaaaaaaaaagctactgtgggcttatgtaagatgtgatcttaaagacacttagaagagggtatcagtttgggggctaagggagggactctgcctggggtcacaggttaatattttgttcttaaccaaaccattcagcccaaaatggctggtagaaaccatctaagaggcactactggctagccaggcttcaggacaaccccagggcccggaacctaagtacctgcaaaccaaggattaccactttctttacccctatcctgcccaagagccaggggaaaggaacagcctgttacgttctggccctggcacaggggctcctacctgcatcagctgccactatctttgcaatctggctgcgcaagtggctcagctcgtcctgcagctcagtagtgcggcttagggctggcagagctggcttcttcagggccagaagcctctcctcggacccacgcaggttgggaacagaggcattgcgctgcatgacaatcagagggctgggtttccaggtgtgcctcagggggcgcgtatcactcctggaccagggaaaaccaagtagatcagttagagacagcaggccactgtgctcctaaggttccttcccccacttctgtgagagtagtatagtaaggttctgctcctctctgagcccacagttctcattcctctctccttgctgcctgccacctcttctgggaagttctccattccttagcagaccagctactgcctcaactacctgacccgggcatatgtctcctcttcatccgcagcaatccaggcgatgtcagccagggtagggactgggggcacatctctcaaacacaggtcagagatgttgggcagggtctatggagaagcaaaagtcatcaacatttacagatgccatgatgagccaatcagaaactgcagaatacacaggaggggtacctaatccggcactgggtgtcaggaaggcttcctagagggggcagaagaaggttcctggtcgaaaacattgaacagaggccagatgacagtcaggcatggtggctcacacctgtaatcccagcatttgggaggccgaggcaggcagaatgcttgagaccaagagtttgagatcagcctgggcaacatggcaaaaccctgcctctaccaaaaaatacaaaaattatctgggtatggtggtatacgcctgtagtcccagctattcaggagactgaggtgggaagatggcttgaacctgggaggcagaggttgcagtgagctgagattgcaccactgtactctagcgtggacaacagagccacattcaaaaacaaaaacaggcaagacacatgagagtctatgggattacaaacagttctgtgtcttcagtggaaaaggcctgagtcaccttttagtagagatggcaactgtctaaaaccactgtgccctctggtgaaaatacaagtacaaggtcatccacaacctgttacagcaataggaaatttttcctgactagctttttataatcctgtatagctaattgagatctacattgttacagcaatgctgttttaaacaaacctgaaaatttgaatatatttagatttaaataaaaataaatgattatacaaaaggaaccataataggatttcttaaaatagctcctcaacctagagatgttgagtaaagtgaaaaattaggattcagtcatgttgactgtgattacaacaaagtaaaaaacatccatctagaaaaagaggactacactaagacattaatagttattgtattattactatgtaattataggtaatttattttccttttacttttcataattttaatattttcatatgcttaaattttcaaaataaattggtaagagtcccttaaataatatttaaggtaatttaataataataataaatgcatatttacacacaagtaagattcaactgtttctgctacaaattatttggtatggtagatggatccaggattgatcgctcctgcatttagataggaaacctgggactcacaggagttaagtgatactccaaggtcacacagagaagaacttccagtgacccaggaactagtgctaaaatagggcatttgggggaagcctccatttgttttcctgattagccctgaatgctcctttgctcttggcaattaaatgagtaaacaaatataaagtacagcacagtgcctgacacatagtatgtgctcagtaaatgttatctagtattaccaatactgctcacatacattcctgctctgtgagagcctgtgcccttgattgtctctgcccagcatctggccaaagaactgaagagggtatagccaagtgtggggacggcctctatgcagtgagccacactccctagctgtctcccttttttttttctgatgcttctgaggcaagttaggaccagttcctgcccaggatctttagacaattctggatagctggcaatctgaatactgggacagcttttcctgccccctacccctgcgacacttccaactccattcctgaccctaataccaaccctgacacctcttctaattccagatccagttcctacagactctgcttcttagcatcttttatacagatttggctccttcatttctgtttctacctgggcccacatcctttcatgcacatatttctatctcctctgtgtgggtagaaagcacaagtatttcttttgtatcccagctctccaaatgcacacatctgaaccatatagtttggggctggtgcttaaccatttagttcctagagggaggcagctgggactaataaatgctacttagctttctaccacagaaggggtctcaagagacctgggccaggtaggaatctctgctgctgagtgggtgctaaaggatccctagacacagaggtaagaccaaagcaccccagtaaaggatgcccagattggccaaaaagagaaggctgaggaattatggcctcagagaaacactaaaaatagtggagctgggcatggtggcttgtgcctgtaatcccagctacataggaggctgaggcaggaggactgcttgagcccaggagtttaagacctagcctgggcaacatagggagacctcatctcaaaaaataataaaataaaaatactggctacatggtcaattcttagggctggtgaagaaaagcagagttcaactcaaaaatcacaatagtcagtgtcccatgtgggggacctgtcaggttccttgtggtcacaggtttgtatgcactcaggaggacacagtgaccaggatatcttataagcatttaacaaatatttcataacagaatgaaaagtgaccaggaaacaacctacttgggcagtaccaaggggtttggggcacagaagcagcactgtctgagcctctactctcctgcccttccaacatactcacctcaaaggacgcccgggcacacggcttcaagggtaggttggtcccaattcttcttactacacttcgagcagccccatgtggcttgttttgccagattgggatggtctggagcaaagagacggagacagctacaaccccagagaatgaatccaactactgtccttgtcctctcctctctaggtttgtggagactgaattccacaaacctagggacagggcactctctaggggcaagtcaactctcaattatagtgagggcaggttccccagttgccagcctacaccctggccagccacccaagggaatacctgctgctgctaaggcagtcaatgttgggagggtcagggaaggggagaggaagtagctgagtgtagagattatccaggctttccttcccgtcctctgtacagaaaggcagacatacactgactcctgaagtgccccaggatcatagttggttcttcttagggggagggagtgaaacggtggccttgctccaattccaggcctctggagaaaggagtgctcaactggagagtctcagaaccttttacagtacttcagcaggcccagcacccaaccttccccaccatacccctgccctgggaatgccccttaccacagtggcttccattcctgacatttgaaccagctcctgcacttgaaggacaaggcagccactgggcagctccgggaggcgggaggcgtgactccttcatatcaggccatctggaggagcaccagatttccctcttgtgaaacaaccccccacagtggggatttaatggtcaccacacaagccccaaaaaaccaggccctgcagagccatgacttcacaggggagaaaaccagcccaagaggctgccctcacccaacacttagctctaagtccagactcttaaaggttctgttaaagatctgcggccaggcgcagtggctcacatctgtaatcccagcactttgggaggccgaggtgggcggatcacgaggtcaggagagcgagaccatcctggctaacacagtgaagccctgtctctactaaaaatacaaaaaattagccaggtgtggtggcgggcacctgtagtaccagctacttgggaggctgaggcaggagaatggcgtgaacccaggaggcagagcttgcagtgagccgagatcacgccactgcactccaacctgggtgacagagcgagactccgtctcaaaaaaaaaaaaaaaaaaaaaagatttgcctagtgagcttggccaacccaagagccttcctgggctctcaggtttcttgaggcaaaacttctaaagatgcaaatagaatccttggtagctacaaagctcatctagccaaattataagtactatccaagcccaggattcattcttgaagatgagatgtaaaagcactgctgggcccttgcaaagggagagatcagagaaaataggagaacgaacaccagctcatgccaatctcagtctcatgagctacagagaaaaagagccaaaaaagtttatcctggctcagccaccttctggctttgtagctacaggcaagttatttaacttttctgaatgttggtttttccatctggaaaaaggagacaggaaaagctgccactggaggctaccttaagggtcaatgagtgaaatggggttgagtgcttaatgaactgttaaaacatgacacagatgggtgaggtgacatctgactgctcttcacagcagtccttgcatggtgagcagatgcaatcagtgtgctcgttcattcacttgttcatcaaacaccaacagtacccacttgtgccaggccttgtgctgggcaccgtaggggctatggaaggagtaagacacagtcatgctctcaaggaactcgctgtccagcagagtgataggacatgaatacatacttctagcaaaggctgagtagcattaggcaggtggccagatgaggtcagagctctggccctagtgccctgtagtaagttgcgagggagtaggaaatgaagacaaaacagcaagagcacaggtccagcacaagaaggtgaaggacatggaaagaggagcagagcatgataaagctacaaaagtagggggcaagtcatgaggtccgggtcactggggagccctggacaggctctgaatgggagatagactagactgacaaagcagctctttctggagacctcctgtggagggtcccctcttctacccttgggagacgaggtgtcattcacttcacgatacacatggggaaaggaagttggacaggggaaggcacttgtctaaggtcactcagtggtcatgccagtgcaaagcacccaaagcctggtccaggtcctgccacctcctgcgtgggctccatcttctcggctcagttcaagcctttattatcagagtccctctgtgtgccaggctctgtgctgaatgtccgtgtcggccacaaattgcactaacggtgcttactgccacttcctctccgaccttacctccaaagacccagccgggcctaaccctcacacacagccagaggaatccttcccaaacacagttaatcacatcgctcatccgtttaaaactggcttactagagccaacacaggataaaatccacaatcagtcccaaacccatctttctctgccgtctctagaccacattcactgagcaccaaggcctgcacgcttcgcagccagccctcctgctctcccccttgccctccagccacactggccctcaacccccaacactgggcccacctctgagccctgcatcaaacaccagcacccccttcgccgagctcattcttcatcattcctcagagctcagcttaagcatcaccttccttccctgcgacagggtcaggtcctttcctgtgcgctccgcagcaccctgcctgtccctcggagtcctcgcgagaggaactagataactgtgatccccgcgcacagcacggtgtctgcctaggacacagtgagcgcttcaacgcgctgaactaaacgaatgaaggggaacaccaactcagctgtcacccccgcccccaagtgtcactggctagaagatcttcccccggttcgccggcagcaccggtgggtcttgtcacctctgcgccccgcagccctccggaggctgcagttgctgtctgctgacaggcgtcccctcaggagaacgggagctcctccagcgcagggccctgctcagcacccctggtcccgggggcccccacggaggccgccgcgctcagtgaaactttgccgcgcgcagcagtggccggagacccgcgcggaccctctccccgcggggacccgccagggcgagtcgcccctcccccgcggcagacgacccgacctgggccaaggtcggccaagtgctcgccgcctgcccagcggcccttggacccacaggacccggacccgagtgcgcggaagcctccgagccgcggccaggtctcagaatgcgcggcggggcagcccggcccgtcaagcagcgaagccgaaactagaagcctgaggtctggcttggtcactgtttgctggggaactccgacgagcaactacccttcggggactcagtttcccccgggccaagtgagacggacagctgcggctcccgcgagaactcgcgcgggaacaggagctgcgggctccgcacagcgcccggcacgtagacccagtctactaacgggctggaaggtcgcgctcccgcctccgcgcctccctagaacctttctcacctcaagctcgggctcccggactctctcacctcacggcccctccttccaccttgggccgcccagcctcaaccgccctcacttccgctgacccgccccccggaagcgatcctccgcagctgcgcaccgaggcgcacctccgcgcaccctcaggaggcgggtccagctcggtggcgaggggagcgcggcccccgagtgggcgaggcgctggcggctgtaggctccgataccgcggagcacactcccctccatcgagaccgtgcccccgcggggtctgtgtccccgggaggagttggctgcgtttggagatccctcggcctggtattcgtcgcgtctccctgcttgttgctctccacgtttagccccatccgacttctggaagcccaggggtgtgtcgctcgacccctaaaatatgctcctacccctagggcaaacttcagaatcctcaccctggcccccttcccagttcttggttcccaggcaggtccctttgcaaagcctctctccagcaagaatgcgcagaatgggcctctttctcctcttgactcctgccctccagcactttgcagctttcttctattttagcctctctctctctctctcacacacacacacacacacacacacacacacacacacacacacggtatattcaatgagtttgcttattagatgggtacttgatgtacaagactccagaggctctgtgggaagagccacattccttccaggctcactaacccactccctctttgtgctccagccctcactgtcttggtctgtggcatgcagttcctgggtcacatttccttctctgccttcagcacagcctcgggctgtgcctggctcccaggctggagttccttggttccaaagcctgcagtcccctctgccagagacagagctggtttcatgggtgaacagcccatgcagtcacaacgggccgcatgctcagaatcctgtacttggtttagtactttgctgttgccgtcttgaaatgattttctaataggggttcttgtgttttcattttgcacggggctgtgcaaattatgtgactggtcctggctagagacctcagaggtcgtccaccctgatctccaccatatctcaaacgctgaagattgacttccaggtctggccctcttcccaggatggcacattgtgttttaatcattacctttccctcctgtgcgatggcggatcatgcaagtccacgctggctgtctgtcctgggtgtagatgctgatttggtgtcccactcagatccccttgcaggaagaacggagctccctacctgggaatttccttcacctcccaagccaatgactgataaaaggtccaaaaggccagttcagctctgcagtgtggtttatgccccacagctcttccactgtgggtcaggccaaggctgggctgagactgttcctgctcagcatttttcctttccctcttctgcttccttccttcttttactggtttttctggaagtacactcccccccagccccaccaaacaaacaaaacaaacaaacaaaaaaacacttcatgcctgtctcaggctctgcttttaagacaatgattttaactcccagatctctctcaacagagagcaccagattctcaaaacagtaagtcctaccacttgttctatcgtaaaacttattttgggcaagtcactcaagccttcgataggtaagatagtacctgaaagcattccagctcaactctgccccaagagggagccaccccatggaaggacggagctgagcaacatgccactcaaaggaaaagcacttagaaccactctagttagtcttctctaattttattacagggcatgttggggacaggggagggaagtgttagaggagtgacagggcagcccggggccctctcccaccctgagcctcgaggcctggtgggggacatgaactgcagaggcatcagataaggcctcagaaagcccaggccatcattttccatgggaccaggctggctcaatgtggaactggccctcccagagcagcaggagaagggctcgcatgggctgcccccgtcacctgtgcctgacaggatggggggggaggcagagagagagcatcagacgccctccctccccataaggggcatgggggatggggacacttcctcccaggacacagggagcctggctgagctggctggctcatgccccatctggtctggaggtcagaggggagtgagacactctggtttgaaaggccttcctttccactttggggaaaacaggcagggagagaggtgagggtgccatgccaaaaaacacccccaaatccagatgcagactttggagccacatgtgggtttgaatctcaactctacctgagtgaccctgggcaagtcacttcacttccctgagactcaagtttcatcaagatgggaacaatgagcatctgcctcacaggcttgtcgtgaggattaagtgagaaggtgcgtgtaatattagcgatgactggatgatacaaaattaagaacaaggctgggcacgattgctcacgcctgtaatcccagcactttgggaggctgaggcaggtggatcacctgaggtcagaagttccagatcagcctgaccaatatggtgaaaccccatctctactaaaaatacaaaaattagccagccatggtggcatgcacctgtaatcccagctactcgggaggctgaggcaagagaattgcttgaacctgggaggtggaggttgcagtgagccaagatcgagccatagcactccagcctgggtgacagagcaagactccgtctcaaaacaaaacaaaacaaaattgagaacaagactggctggggaaggctcagtggacacgcccaaggcaagtggggtaactcggcacataaaaggcccaggagtggctgcggagatgtctgccttccttcttcctctgccaggctgagtgagccccgggtggggtgagggggtggggagagaactgggggctggggagggggcagcctgacttcaagaccttaatgaaagagagtacaggcatgcctgtgggcctttgtggaggatgggacagtgctggggatcatggatcctctgaggactgtttttaaaaagctgaagaggagaaggaagagaggactacttcttcccataggtgcagctgcaaagacatcaagctggacccatcgaggatttcggattcagccatcatggggctgctgccggggaagccactgcccctcctttctcctcagcactggggttataaaaaaatacctacaaaccatgagaaagtttgtgtaaaaacacttttctgcacatataaaaagagagactggccgtggtcagtggctcaggacgtggaccaaagtcccaagagtggccaaggggagtccgtggtgccccagaggtagaagagctagcctggggcacccctggttgccgggacagtgccggctctggagaaggctgtggtgtttggctgggttgtgcttctgtggatgcaaggtctgaggggcaagaggggcggcaggagcgctggctcccgcagtcctgcagagaccctgtgctaaggtaggcggtgggagtgccttggccctgggcctcgggaacccccttagtgaaccccattgctaaaggcagaaaccccttcacagtaaacttccccagatagctggtcagtggcgtggtcagggaagctgcagggggtcccgtctgatttccactctgatggagggttctgcccagaggctccagaagactggctcctgttgagactgaccccagctggggacatcaggcacaggagggcagtccggggtatggccaggaacgaaggctctagataaacaggggagccgccttggcagcctggcccctcctggctggggcttcttgatgtttcctgtgggaagggctgaaagcaaggagagggtggtggccccgtcttcctagcctgctcctccctccattcttcaccccacaagggcctagactgtgcggctggctaggaaaggtccagggagttcacccaggccctgatctgggggggccaagcagcttccagagccaaatgggtagggagagccgagtgacagtcagagctagaggttcctctgcccagtcagcccaggcatcccttgtctacccgccaccatggagccaaggctgtggtggccaccctcagtggatcttgtaccctccaaggcagcctaggagtggggtgggagtgggcggcatctgcagtctgaaatgggctgaggaccactctggctctgaggcgtgggggcctgtgcatcagatcccgtccaggcactctagggctggaggaggggcaggccacgccggagtccctccttcaggaactgcatgtaggtggccgtggacgggtcttcaaaggtggatgagaagctgaagagattgctctcgatttcctcgggcttcacggaggtgatgtccaagaagtagttggcattgatgtgatggacctgggagaagggccgggtgaggcaagtggggcggaggggggcccccaggctccctgtgccctctcttctatggggagaagcagggatgctatcaggccttgactgtccttgtctgaggtggatggtgggcaggcagtgctgccgtaagccctcgccagcacccgacaccatctcatcaccctgtgtctgacgagggggctcctccctgccttgcctaccaagtgaaaacccaacaccttccaacatcacctcttctactagccctctgcccccgccccccgaaatgacccctctcctctgttcctgtgaccccggactcccatcctgaactccgtgctcccttctctcactgcagcctcacattcaatgggcctctcctttggcctctcgctccagagactgagctccttcagcacggggctgtgtctttatctttgtgcctggcacacagtaggtgcccagtagatgaacaaatgaatgaatcagcattcaatcaacattcatatgaatgggaggcctggttctcccaaccaggcccagcctcatccagttccccgacaccatctcatcacccttgcgcctgggacagcagatgccttccgcctggtgccctttcctttacaccaaaccctcactggacacctctcccgtgacagcccctgctcctgaactgctcccatcctaagatcctgaggaagccggccccctcctacagccctgggtcccacactaaccatgccttgggacttaaaggatgaggggtcgctttgatcagaagagctggagatctgaggctcaagggcaggcctcggttcaaagccagctgcacttaattgactgcaacatttgtccagtctctcaactttctgggcctccttgtttataaaatgggtattcatgaccatccatctcccaaagctgctgtgaggccccagtgagaagacttgctgagtgctaggtaaggggcccttagggagaggtggggtcttgaatcttggctcagggccctctcctggtctctgtcacaaggcctggctcctccctccccttccatcccaggactggccgccatggtccaaggtgagccttcccttccaggctgtgtttctagggaggcgctgactctgcctcaggactatgctcactgctgcgcagcccccgatgaccaacacctgcatcacgattcctgtttctacacggggacaacggaggcttagactgggtaagagaccagcttgaggctttgcagccaggaagtggcagggacagtcccgaagcctgatgaagtctgcacatccacgcctcctgctggttgctcccggggccccgaggtgcctgggccctgtggggtctgagtgggggtgcctaccacggtgccattgggcaggcagatcatcatctccacggggaagctgtacttctccaggtgcaggccagccagcttctggtgggacgagttctcctggttgttctgtggggacagttgcacactcctgatgccgcggcccccaccactgttccggacgctcctgttcctgccacctgcccgctcacctgcagttcctccagctccttcaccagggaccaggtgctgatgaagctctcgttgagcagggtgaggatgggcgaactttccaggacagtctcccggagagtccgccctgaacctgttcaggaagacagaagggtgaggcgcccccacatcttgctggggtgcaatcttgctttggggagacctcacgggctgcaggacagtctctgcacccaagtgaaataacagattcaaagagcctgaggtagagtaggtgctgaataaatgatagttggaattaacatcaataatataccagcatcctgggctgagattagggttaggggttctacctggccctggggacttgcagacagtgacagcttcttaaatccaatgaacgctctgtgtcccagggccttcacacaggctgttcctctacctggaacactccatccggtcacttgagaaactcctactcatccttcaaagtctcagcgtaaatatcactgtcttcacaaagccttccctgacccccagttatacactctggtgccactctggactgtcccctgtagaacactcaccgtgcttgtactgactcatttggtgtctgcctttgcactgtgtctccccctttgagggcagggaccccttctgccttcctcactgtgggacgcaagcacccagcccactgctgcactgacggttgacggggtgagggtggggcactgttttgttcatctttgtgcccactgccagacacccaaaggacgttgcatctagggggcctctggtgaatttcctgaatcaattaacacaagcccagcctctggcccgattttttctcttacacgtatataacactttacagtgtatgcggcactttcacctccatgtccacagctatgagaggtaagtgtgttatcccctcttactattgagaaaactgaggctcacagaggggaagacacttggtcaaggttaccaagctgacaatggctgagtttgaacccagtctgccagggccctttcttcagcatctggtagctccctctgggctcagcacagaaacccccaagccctcaccccacgcccctaccatgggcagtccctgaggccctcacaactcaacagaagagtcccattggtctcagagcctctggtaccccacaaggtgtggactttcccactgctccccttagatccagccgggcccctcacctcagcaggactggtcatccagggccccccacagcaggattgagtgcaccagcttgttctcagccttggctcggtcgaaggcctcagtgaacggcaagtaggagacctggggccacaccgagacagagcgaagccatcatcaaagcggccagggtcccactcgggctgagtctgtagtgtgtgcaagtgtgtgtgtgtgtgtgtgtgtgtgtgtgtgtgtgtgtgtgtttgtgtgtaggcatatatatttgtgtgtatgtctgtgtatatgtacatttgtatgtgtatatatgtttgtgtatgtttgtatatgtgtgtatgtgtgtgtgtatatatatgttagtgtgtgtgtttgtatgtgtgtgaagtgggtgctactaagccaggggatggatgtctcctccaagttctatttattattattattttcatttattttttattttgagatggagtctcactctgttgcccaggctggagtgcagtggcgcaatcatagctcattgcagccttgaactcctgggctcaaacagtcctcctgcctcagcctccccaaagctttggtactacaggtgcgtgctaccaccacccccaggtaattaaaaaaattcttttgtagatatggggtctcgctatgttgcccagattgctcttgaactcctggccacaagtgattctctgcctcagcctcccaaagttttggattataggcatgagccattgcacctggcctcttcctccaagttctgaatggcagcggggaggccccgctggcacagctgggcccaacagtgagacagcctcagtagcaagccctgcacacataccagcgtctgtgcccagctgctgctccacagctcccagcctctgcccatgcagcctgaccctggccttcacccctgcccagcctcaccttcttgaaggggtacatggccacctccaggcgccgggcagcctcctcccagctcagctcctgctgccacttgatctcctcaaacacaaactgcaggggctcccctgaaggcaggtggctgtcgatcatgctgccatcctcatccaggatcacggagggcacagaggggcccgtggcctccagctccatctgggccagaggtcagtggtagggggaaggctcagagatgggcaagaatcctcaggggctcccctagagaccctccaaaatgctccactcattgcagagggagggcggggccctgcagccgagcccacctggatgggagcctcctgtgcgctcacctggggtatgtagccgatgtccacctccatgttgctgctttcactggccccgtaaagccactccatgtccacattcagagacctgggatggccagggcagagtgacaccatcatcaaagcccattatctgtgtcacactttatctcacataatacctgcaactgtctccactttccagatgaggacactgaggtttctcaaggtgaacacctgctctcagagccactgggattctggctgcagagccctggccctcttccccaccaggctgccccttcctaaggcactggagccacttcaccatccgccagccctgcccctcgcaattcacaaagggcctgcacagccatggcccgtgtactctccaggaccctttgaagcagagagatggccagtgcctcaaggcgggtcacagggtggggcaggaatgaaaacgagcaccgtggtccctgcacaggcctctggcgggcagcaggaaatctgagccgagcagtgcaatctgcagatccgccgcacgagggagccccagcactggcaaaccaccacctccgcagcagggggcacagagggcagagctaggtaacccccgggggtcagcagtccctggtgcctggtcctcagacatgagcccaggaacagctggtcctggagctggccactgcctctctcctcctgtcccatacagtccaggccccctcctcaacaaccctgcgatggaggcaggtgtgcccagccctaggtgagcagatggagggcttgtgccctcctcttccttttccctttgaccgggaagcccctgcccttcccactctggggagggagggaagccacccccactcctaggggcaattttctcttcccatgttatcccgaccatcctctcacgcctgccctgtgggtgaagtaggccaggagtcagtctcccatccggcagatgaggaaacaggcctacagagggccagggccttgcccacagccacacagccaatgggttccacagcagagacttaactgcagacctcctggctcccagccaggtctcatccctgtagagcggtcactcaggcccactcggtggccacttgctatcagttaggaatctggacaaacttgaagccagggcctccggggtcctctactctgctgacaggtggccagccctgaggaggtgaggcaagcaggtggctggtgtagcaccgtcccggaagcccctctggggctctgcagcagtggagggcctgcccttggcctttggatgtgctgttcctctgcccagcaaaaccctcagagccctgatctctgctgagatgacctttttcttctgggaagccttcctggaccccacagctgggtccctgcctagctgctggccttcctcttggtggcgtgcacaggctgcggttacagctctgcctggggcctgtcagcagtatgagggcggggaggcccagcttcaggaagggtctgcggactgctgcactgggtcccaggcacagaggtggagggccaggccacgggtgcctgggaagagctggtgggtgatcagctcattctcttgcctgcctcatgccgcctcctgccacgtcagccccatgagatgggctctggggagcaaaggaaggggcagagacagaagaggcccctaggctcctggagctggggagcaggacaagctgtaggagggagccaaggctgggccagggtcaagctcccacctgtggttgggcacgaagagccggaagtcgcggacgtgggtggcgtctttggagaggatgatgtggccggtgaactgagcaggggagaaccaaaaggggaagtcgggcggctcactgagctggaactcggcatggatcctgtggggaaggggatctgctgcaccagagctgcccaccttctccccaggagcccgggaagccttggccagaatcatcagggagaggaggctgagtgtgggggtggaggtggatgggccagtgggcagcagcgaggctctccaaatgctgctcatccttcgaggcccgggtcacatgcccctcctctggaagccctgcctggaccccctcccccagccttcacagcttctggagggcatgtgtgactgggtgtccttcccacttctgtgtggatggcacaaccatggctaccagccccgtgccaagcaagttccacaacttttctttctgaaccctcacgtgccttacgaggaagtcatcagcacccggatccacaggtgagaaaactgaggctcagagagccaaagctgcttgcccaagacggcagtgggaggagaggtggagctggggggctcaagctgggccctcccctctgggcgctgtaccgtcatgcctccccggtgctccaggccagccagtgtggcccactcaccggaacatcacagtgtagtagaagtcgctgatggcagtcaggcaggccacagctccctgaggggcaaagcgggtcttcacaaagggccgagggtggaacatgctcaggagccggtggatgatgacctgggggcggcgggaggcacgtactggcttgctgggtcccgctgggcctggatccgctggggtgggggtcagcccagacccgacggcccaggggccccatggggagggggcaggtccagaggaaggcaggagagcaggtggagcaggcctggcactggggtccaggcgcagacagaggggtggccactcctgggctcgggcggaggggccccacgtcgcaccccagctgtcctcacctccttgcccttgggcggcggtggatagaagcggttgttggacaggtagccagtgaacatgctcagctcactggggatgatccaccagggctcacccagctcctggcctggcgggggaaggaagggctggaagtggcgggtggcaaacactgcacttggtgaggcggcggctgtccagtttcggaggccggacagggcgaggcgggagacctggggcgggggaaagcaaagctccaggaatctgagaacctgactccggggtctcctgtaccatgtgggtggaggtctccctcaagccccgagccagcccacaccaagggagcagatggaccccagggaggttcctgcccttatgatggccacaagcttagcaatatcccgccagagagaggctcctctccctgctgcagtgcctctgcagcccacccaggcacagcccacccaggcacagcccacccaggcacagcccacccaggcacagcccacccaggcgcagcccaggccagagcagctcgctcgagggcaaggttggaatggggatggtggggctctgtgcctcacatagtcccacctccatcctatgcataagcccatgggccagccttgggtgccaccaccctgcctggcttccctggccctccagcagccctactctccctccccagtctcctctccaagtctcctcccagggactaatgtcccactggccagctcagggtttcggtttggagctaagtccgatgagggtggtggccaatcatgtttgaggtgaaatctctagggtcaagagcaggatgagaccacagggaaggggaaggaaggccacccccagaagggccctgccttaagtacagcctgccccaccctgggcaaaaggccttccctaagcccgagtcctcatcggtgacctgcctcgcctctgtctgacaagctgatggctcggagaggacgctcagagaccacagagctgtctacacgtcggccagcatttggggaacagcagattccctcttctgtcgccacctccctggcagcaggagctcaggcttggtgggaggtaggaggaaagcaggcagggagctcccacagagacagatttaacaggcggttctcaaggcagagctggctgtgccgggccaggccgagcccgccttcctgggtcctgcttgtaggcttgccaccccctgcaggggacctgccagcgatgggtgctgggcttgctggggctctgctcgggggccagggctaggggtgctgctcctgcctcaccccagttcttgttgtctgtgcggacttatctgctcagaccagcccatcactgccaaatccatggagatgggttccccatctccttttgtggaaggtcagaccggttttgaccacttcctggactcctgcctatctgctgcactgtctccttggctgagaagaacacgtttattcatttgttcattccacaaaatgttttatgcacctactgtataggaagtttctatcagggtacactgtgcaccctgtcttcttggagcttatagtgggagacggcaagtaaacaggacccaaaacgggcaatgcccttccctgtgagctcctccttggaatttctgtccctccctgaacctgcagcgatgaggttaagaaaggggctcccggccgggcatggtggctcacacctgtaatccctataatccctgtacgcctataattcgggaggccgaggcaggtggatcacgaggtcaggagattgaaaccatcctggtcaacatggtgaaaccccgtctctactaaaaatacaaagaaattagccgggtgtggtggtgggcacctgtagtcccagctactcgggaggctgaagcaggagaatagcttgaacccgggaggcggagcttgcagtgagcagagatcgcgccactgcactccagcctgggcgacagagcgagactccgtcccaaaaaaaaaaaaaaaaaaaagaaaggggctccccagcactgcttccctgggctgggccaggtggcaattccgccacaggtgccagcctcaaggtcattcccaagtttcttttgccatgtggctgccaggctctagagttgggcactgccaaggggctgctgctgggcagcagacatccaacatcccctggggacctcaacttcaacatgtgcagactgacctcattctctatcccctactccctccccgcctacagtccccatctgggcaagcagcccaccatgcccctggtcacagccagaagcctgagtcatccaactcctgcccacccactgtccatgaggagccgctccctgcccttccttccccagcatcctccaggctgcccttactctccatctcctccgtctcccctccagaactggtcttcttgcctcccacttctccccattctacacatgccccgtccctggcctggagagcccaggtctgatgagaaagctgtcttatttaaaatctgcacgatattcagccaccatagaatgaaggccaaaggcaggcaacaaagcccttggtggggtctggcaccttctctcctggccccactgattgggatgcccctgtgtgggtcctgcatgccccctgggcccagacacacccactgcctggcctcagtgaccagcctggcactcctgccttcaggcctctgttcgtgctgaagtggcattggctgagatgaaaaggctgggtcgggctgtgtgggctgggcacagagaggcagtgttcctggcagagggaaccacatgtgagaaggctcccagttggaagaaagcctggggatttggaaggaaggaagtctggtgtggttggaacagaggaagcccacagaggggaggagagagtgggagagagtgcaaaagggcaggcaggggctgaggcagcttcatcctgcaatgcgctcaggaccctgtccaaagggccttgggttggggaggggctggcaaggagagcatctgtccacctcctacctccaccttctcaggtgccctccccaccccacagccctctgctggggaccaaacctcaggtctagatcatcagagttcaacagagtacctatcaggagccaggcatcatgctatgccccgtggggaagagatggatgtgtgggaagtaatcatcatagtgtgtgggaaataatcatcatagtatgtggggcggctgcactaacagggtctctactgcactgctgcttcctccgagacccccccaacctgtgctcagtcaccctgctgagccctcctcatcctgcagtctaccagatgtcacttcctctaggaagctatcccagattccccagtctggggcagaagctaatgcttctctctcctgctcccccagcaggctgtatgcctggacagcagggacaacatcaccgcacatggacctccagggcctggctctagtgggcacacagagggcagaggaaagatggatgaatggagcagaaactcatcttcgggatacacacagatgaccccactgcctgtggtccccaactcacccctaggaagccatctttgctcttggtcatggtctccgggagcagaggctggaatcgggcttctatggtgagcgtctcctcgctagggtcagggggcaactcctcctcctcgcagctggccgcgggagttgaccctatgagacacagacatcggagaggcactgcccttatgctacagggctcacctctccctcatcatccacactagctggtgattaacggagccaggcagggggtgggggtagctggggtgttaacagtcaccaaagtaacaaccagtgtatcgcattttagtttcaggatagcccagggaggcagataataacattaccaactccatttgacaaatgagaaagtgttcagagaggtaaagtcacttccccaggtcacatagctagatggtgggggaatcgggattgaaacccaggcctgtttactcgaaacccatgaccaaccacgacccttttctaggtcttctgggactgagaggaactcagtcaagggaaccggagtaatgaatgaagcaagaaacagaaacaggctctttggtgtcatagggagagcactggtttgagagtgaggagacccactttcccctgctttttttttttttgcggcgggggggggggggcggggggggcattgccccagctgtaggaggggctggactggcagtgtggctggatttgatttcttggatcttttcctgctcagagatctggcaagtctataaccttcccagtatagaaggattcattttgaaaggctaagggacaaatgacgcctatttcaaaaggggtgagtaatagtcaccagtaacaaagtgtagccagcggagggcgggggtgggtcttgccctgtctgccctctcagggcagggtagtggtacagagatgatgcctggcatttgctgactgactggctagcaggctgaatgatgcattaaagcagttctcaaccagaagtcctcaaaatcacccaggatgcctttaaactacagatgctcacaacccacctcagacctactgaatgagaatctgcaggggtgagagtctggaatctgcccttttaatgagcactccctgctgctcctgatccaaatccctattctgaagaatcacttatttctgtatttgtaagtcaatgaggtaaaactttccaaaacgcaatctagaaacccaagaagaagggagcaacaggaatatgcagggttattagtaagccttgcttattcaattattttactgatatcacagataaatattaataataatgattcccaaggcagctcatgcctgtaatcccagcactttgggaagccgaagcaggcggatcacctgaggttaggagtttgagaccagcttggccaacatgatgaaaccccgtctctactaaaaatgccaaaattagctgggcatggtggtgcacccctgtaatcccagcccagctactctggaggctgagacaggagaattgcttgaacctgggaggcagaggttgcagtgagccgagcactccagcctgggtgacagagcaagactccatctcaaaaaaaaaaacaaaaaaacaaaaaaaacaaaaaccaataataatgatgatgcccccaccacctagctgtatgatctggggaagggacttcacctctctgagcctttgctttctcatttgtcaaatggagttggtaataatgttattaattataatactactactcagcattttacagccctttggctttttaataaaaagttttatttcctgacttatgagtaacatttgcccattataggtaatttgtaaaaattttaagggataaggcagaaaattaaacactctcataactctaccaaatagaactagttggctctatttcctgcttggatttgattccccctgccctttgatttctcaatacttggtccatttttgcattcacagcctagaggtaatgggggaattcttttaccctgatggagaaaaagatttctgtgcaaaaaattaaaagtgcacctcaagctttgctaacatgtcattatgagagaactctcactctggccacaaaaaaggacaaagaggtagctgtgcaaatgcgcagaagtgtatgcaaaacaagaagtacaggcaaggccacaaggggacgacctgtttatctgcccatctgctttcatgacagaactgcctgccactgagagacattgatacacatccactccagctcattagcatttttcatccaaccttcctcctctagcagtgatcacaggtcaccgggccagcacggaaccaacctacacaatacacccctgaaaaacagcaggctagtgacagcgctttgaagcttatgcacccgaaacagccagcatgtctctcttgcctttcccatcaatgactgacttacaccaggcaatctgggtaataagtaggtgtccaagatcctaagttcaagaaacgtcacaagaagttggaagaaaatgggcacagaggttagggtggtggtggggcagcgagagaagcgttttataattcattagaatgtttcagcccctcatctttaaccaaataaataaataaataatcactgactgcactaggcaaaaatgatagcaagaatggaataggaggccgggcacagtggctcacgcctgtaatcccagcactttgggaggctgaggcgggcagatctcttgaggtcaggagttcgagaccagcctagctaacaaggcaaaaccccgtctctactaaaaatacaaaatcagcccggcatggtggtaggtgcctgtaatcccagctcctgggaaggctgaggcaggggaattgcttgaaccagggaggcagaagctgcagtgagctgagattatgtcactgcactccagtctaggtgacagaggaagactccatctcaacaacaacaacaacaaagaatggaatagaaatctgaaagcacctaagcaaagtttcagatttagtaatgatagttatagctcctggctgggtgcggtggttcacacctgtaattccagcactttgggaggccaaggtaagaggatcgtttgagcccaggaatttgagaccagcctaggcaacgtagtgagactgcatctctacaaaaatagaaaaatcagctgggcgtggtagcacatgcctgtggtcccacttactcaggaggctgaggcaggaggatcaattgagccagggaagttgaggctgcagtgagctgtgactgcaccactgcactccagtctgggtgacagaacaagaccctgtctcaaaaaaaaaaaaaaagttatagctgctgtctattggaaatctactgcatattcgtcactgtgcatttcttttctctactgaaacctgtgagctggtgcaggaccctgaagccagatggccccagttctagccctggctccgcacctttctagcttgggaaactggggagcctgcctgtgccttagtctctcagactattaaacatggggatcatgacagtgtccatctcccagggctactgtgaggtttaaagagagaacccacatgaaatacttaaatacctggcacggaggaggtggccaaggaatggtttttttgtttttttggttttgctttgtttgtttgttttgagacagggtctcactctgtcgcccaggctggagtgcagtggtgtgatgtcaactcactgcaacctctgcctcatggcctctagtgatcctcccacctcagcctcccaagtagctgggactacaggtgtgcaccaccacacccggctaatttttgtatttttgtagggatggggttttgccatgttgaccaggctggtcttgaactcctgggctcaagcgatccttccatctcccaaagtgttgggattacaggcgtgagctacctcgcagaccaaagaatgttagctggtattattgctcacaagtctgagaaaaacaggctcaggggttgctggagcagctcgcccaagccaccagctacaaagtgtcagagctgggaggagtccagggcctctgagatcccacgagcttccctccactccagacggccgctcctgctcagtgaagacaccgttggccaaggcgccctcctccccagccgccagtctctcctggtacctgttagcttctcagcaatgggtttgaactcctcagggctgatgtacatatccccgtcagtgtccaaggaggaaaagagaaaaaggccatctgtccccagggtcttcagcgccagttcctgcttgggaggagagactgggctgggcaccatttggcggcctggtctcctggtccccaacaggcagttgcttccgcatggagccccttctcccaccatcttcctgagctctcccagtgcctcccggtccatctgtgcaaatgttgcctctgaactgccccagagcctccagtccctcctggtccctgctcatccactgtctggtccgactgccccctcccagtttgtccccactccgccttccgcctggccctggctgcttggccctgttcctcctgcaccttctgtcctctcctgtgtcccctcctcactgtcccagggctccccagtaaccctttaagactctgcgggaaccagcttcactgtgtccaggtcacccctctggatagagacccctccagtctgtcccagccccacactggcctccgttcgccttccccccatcagcccggccccaggcaccccccacccgcctcccgtgtcccctccttcccgtgctccctcccgtccagtccccctccgccctccgcctcccccgactcgtccatgcccatgtcccccctgctgccgaggctgggtccttcagtccccgctcccgcgctcccgccccagccagctcgggcccggacctgccgcgcggccgcctgggcctcggcgtggcgggcgcagacccggacggcggcggcagcggcggcggccagcagggctccgagcagcgccagggaacgggcgcggcggcgcggtggcgcgggaggctgcgcggcggggccggggctgggcggcccgcgttggcccggccgggcccggcccatggctgcggctggcggcggctgccggcggcccgggaagcgaaagagcggggcggggccgggggcggggcggccggggcggggaggggcggggcggccgcaggggctgggcggggggtcgctggttcccggcttcgcagcccggccagagcccggggcggggtcagctacaccggaacgccaagaggggctgatcgcgtctatgcggtcgggtccgtagtcccggccaccccagcctccccaggccgcttcctgcctctccgcgccccttcccgtgcttccgttcccaaagctaagccaggcctctgcggcccacttgcctggcccagcccagagagcgattccagactggggactgggacaaagaaggggctggggagaagccacacaccctgtgctttcctggagaaggggcgtcgggggcctctgaggcctcgtgtcctcctctgctggcagccgggcacgaggccagagactgctgaggggcatccgtccatccttatcccaccagttttctaaaagttcctctgtcatctagagcaagacaaattaaaaagaaagcccagcccctgttcccctcatgtgcagttggggggccacctccgcagatgcatgggttatggggattggccttgttccaggcacagcaggtgcagctctgaacctgcacttccctgggcccaaatttcctcatctccaccaaggagttaaaagagccccccaacccccaccctccgggctctggtctggtgaggggaaggcgaggctccagcccctcagcagctggagctaccagaggccctggcttttctggagaacagcatgcggcatgcttggaggagggccttggaaataggggtgggtggtgttgaggacatattttcatgcctgtcaatccccaggaccttggttccttggggctctcttccattctttcaaagcccccagttaccatggggtggctctagatgtctctacctgcattttctcaggcgagggtggcagctgcagaagcctctagacaagaattctgagcccagaggtgagcagtgcctgcctttgcagagccccaccaacccccccagcgcaggggcacctgtcaggcctgagggatccaaaggatgctgagctctgcccatgtgctggacttcaggtggggtgatttacacattctctcactctgttctcaagccaccttgtgaggtagagactgcttccctggttttcaaatgaagaagcctgacctctggcacccaggtctatgggtccaaatctcctgccatcctgcctcccaggcttcccacgggatgacccggtcgactgagttgggggtggggtcctgcctccactgcccatcctgttcttctttggtggccagccatggcagcaccaggtgaggccttcccagagcccacacagggcgtggcacatcgtgggcactcctcagtgtctgtcagatgaatgactcccagggaccttccagagttgtgggcccacccaacccttgccctgtgctctggccccagtgtccttagagggacccactgagagcctgacatctggcgttggcttctgaaggcttccaactgtgccactttcaactcattattgctactgtttggggacaccctgtgtacgatacatgatactagaaaaccaaattctattctattggaagcaaaactagtagagcacaaagcaggttaggaggggaagattgatgagctaaggcttctggaaaataaacaaaggaagttttctttcccagataacttttatttattacacttgctttttcttaaagatacagataccccactggtctctgctgcccagtgctgaagaaatgggtttctggggcttgcgggacttgggggatgattctagaagctcgggaaggcgcacagtgggggtgggttaatgacaatcaggtcagatcagtgtgcctctgtgaaaaggatcaatcttgggcccagctctgggagatgtcagctctgggaggtgtcagctctgggactggcagtggagcagggctggtttcccactggagggcgcccttcccagaagggcttgtcccaaaccaagatccccggcagggcaaggccgtgagagatagggcctagtgggtggttctggctggggcagccctgcaggatctctttggcaccttgctattgcctcccagtgggcaagggtgacacttgggaactggcagccaatgggaaccacagcaaggtgagtgacgcactggccacgtccatgagggtctcggaggttagtgggcactcgctcattcatccttccaacacatgtattgaagggctactatgccgtgtcctggcgattgggtgtccatcagaaaacaaaacagtctctgctcttccagatgagtcaatggatactgcaaccctcctctcgaggggtaagtgctctgagaggggtgtgcacagaggagggtccccctgactatcaggagggctcagaagaggcttcccagagcagaggtctggccagaccttgacttcaggagctcaccaggcatagcacccaggaagatcattccagagggtgggaacagcagaggtgaaggcccagtgatgtgaaactcgatggagtatccgtagcgtctcgagaatatagtccagtggatttgagcagagggacccgggggggaagtgtgaagagggaggaggaggaggcaggaaggttgggctggcacgctggccagcttgtgaaaagcctggactttaccactgagacaatgtggaggcatcagaagagagggacattcagccactgcagcacccttcagactccctactgggtcccagcttctgcctgggggcacccacacccacctccctgcgcagagggtgttggtgtaagcactccaggccactccatccacccatgagaagaggagggagcctgacctgcctgcagccacatttaagtaggggcagggtcactgcctcgaatcctggtgtctctctctctctcctacacacacacacacccctgatgtgtgtgtgtctctctctctttctctctcctacacacacacacacacgcgcgcacacacacgcgcgcacacacacacgcacacgcgcgcgcgcgcacacacacacacacacacatccctgcctgcctcctagtagcatcctctcttctgcttcctgtctctttggggtaaactcaccaggaaaggccttcttcccgcagggggcgctgctgccctccagggaatcaaatcaaattaggattttccattccagtttcaccggcgacagtgagccaggaagagggccatttggctttgttttttgtgtttcttctcttcatctgggaccctagagaggcaagtgattttccccaaacccaaccctaacatcttggcagccaataataggaccaacatttgagaacaaaggatcacttgggggaaacaggtgccactgcaggagttgcttaagcatgcccggaccacgtgggcctctccgcaaactaaatacctgctgtgtgccagggactgttctcagccctgggaacacagtattatagaagacgggcaaggcacttcctctgtgggggctgaatattctactcggaggaaggaaatgacagacacacaaggtaatttcagagaaaggtaagtgtgaaggagtgagacagggcactgtggcacagtgccacaggcaggcatcagcaccgtagctgggaggtgacacatacactgcgcctggaacgggaagaagcagccagctatgagaagaatcgaggaaggagcgtcccaggcacggagaagaggggagagccggtgcaaaggcctggggtggaaacaagcttggtatgtccaggagacacacagaaggcagagtgagttatgggaagagaaaagcttggtgacagaggctgggacaggacgtcggaatcttgcaggcctcggcaacaaacttcattcaatttatttattgagacagggtctcactctgtcccccaggctgcagtgcagtggcacgatctcagttcactgcaacgttgaactcctgggctcaaagcatccttccaccccagactatcaagtagctgggaccacaggtgtgagtcacggcacttggtcaaacttcattctagatatgatgtgaaaccattataaggtgttaagcagggtggtgacaatgtgtgacttggttttttgttagtttgtttgtttttgagatggaatcttgctcttgtcgctcaggctggagtgtagtggcgcgatctaggctcactgaaacctccgcctcccggattcaagcaattctcctgcctcagcctccagagtagctgggattacaggtgccggccaccgagcctggctactttttgtatttttagtagagacagggtttcaccatattggccaagctgggctcaaactcctgacctcaagtgatccgcctacctcggcctcccaaagtgctgggattacaggagtgagccaccgcactcggctggtgacttgttttttaaaagacctttctcatagcccagatgcagaaacaacccaaatttccagcaatgaatggataaacaatgcggtgtatccatttgataagtattagtgggcaataataaaccttagcaactttaagctgggtggaaaaagccaaacacaaagaccacggcttgtgtgattcattcagtgaaatgtccagaatccacagatccagagagacagaaactaaattagcagttgcctggggctatagtgggagaccgggaggagggggctggggagtaactgctaatgggtacaaagtttcttctggggtgataaaatgttctaaaattagattataatgatgcttgcacaattctgtgatatactaaaaaaacatgaattgtccatctttgaagtgggtggattttatggcatgtaaatgatatcccagtaaagcctcttggttttgatgtttgtttaaagatctttctggtttctgggtagagaatagagttaggggatggacagaggaaggagggagacaggaggctaatgcagtcgcccagacataagatggcagggattgggcaggcgtggacaagatatatgagtgtagcagagccacagacaggatttgcggatgggtcagaagtggacggcaagaggaaagaccagcatcagccatgggttgagcttgggtagctggtggcaccatcctgagatgaggcaccctggagggaccccggctggggagaaggcttggtccagtctgccaggttaagatgcctgagagctggctgggcgtggtggctcacgcctataatcccagcactttgggatgctggggtgggcggatcatgaggtcaggaggtcgagaccatcctggccaacatggtgaaaccccatctttactaaaaatacaaaaaattagctgggcgtggtggcgcacgcctgtagtcccagctactcgggaggctgaggcaggagaatcgcttgaacctggaaggctgaggttgcagtgagccaagatcacaccactgcactccagcctggtgatagagggagactccagctcaaaaaaaaaaaaaaagatgcctgagagtcaccctcacggaggtgtcaaggaggcagttgtgtgtgtatgactatggggctatgaacggtagggaaggggggcgtggattataaatctgggagttgccagtctaaaaatggcacttaaagccacaagattcaatgagatcattgaagagagagaagagaagccgcctttggcctatgtggccacagatgccgccgtgtcttggaatgttgagtggctttggctggatttacaggcatggagctgtggctgtgattagccaaaaaatagattaacgttagaggtcatgacaggcttggcttggctctcgtactgtccaggctgggagagagatttgtttcccggggtcagtaaatgcccccgggactttgccagatggacagatttagtctcagcatcacgagtgcagaggtcctggttacccagcctggctgcccactagtcacctggggcctttgaaggagaccaatgcttggggccaacccccagttggttgggggaaagagggacatttttaccagctctccagtgattttgagggagaaaatgtaaagacggccaagttccacacacaagccacaaaaaagagtttgacattcggggcctttccaacggtgagtgtcaggcacaggcagatggtaccggatgatctggcctgaattctgttccacttgtcttgtgtgttttgaactgggtccagggccaaggagggaaccgtgctggggggtcagccaccctggtctgctcaggactgacactgatggagcaccgaggatgtgggatattcggtcctacaagcaagaaagccctaactgggatgagctagtcacccaaacaagggagaggcatagctcagcttgcatctgagaggctttatttcatcatctctgatcttggttgtgcacttcagaggttttttttttttttaccacaaatgggtacaagagggcttcataatgaccagacaagaaagtgtgagcatccttattagacaggagctaagtggttataagttgtatcatataaattaagacagaaaatgcagaggatttttttttttttttgagacaaggtctcactgtcaccctggctggagtacagtggtgcaacttcagctcactgcaatctctgcctcccaggctcaactgatcctcttacctctgcctcctgggctcaagagagcctcccacctcagcctcccgagtagctgggattacaggcgcctgccaccacacccggctaatttttgtatgtttagtagagatggggtttcaccatgttggccaggctggtctctaactcctgacctcaggtgatccgcccacctcggcctccgaaagtgctgggattatggttgtgagccactatacccagcctattttattttgagatggggtctcactctgttgccctggctgcagtgctatggcatgatcatagctcactgcagccttgaactcctggcctcaagccagcctcccgccttgacctcccaaagtgctgggattacaggtgtgagccactatacccagcctcagtggaatgtttataatgcaaaaaaccatgaaaagaatgaaatgtctgtgcctgaaattaggtgatggtgaaagaggtccacatagggtttgctctggggatggcaggtattgactagaagcagcacatgcaagccttctgggtgctggaatagtcttgatcttgactggggaggtggtcatatgagcgtgcatataggtcaacattccttgagctggtcatttaagaatagtgcgttttaggctgggtgcaatggctcacgcctgtaatcccgacactttgggaggctgaggcgggtggatcacctgaggtcaggagttcaagaacaacctggctaacatggtgaaaccccgtttctaccaaaaatacaaaaattagccgggtgtggtcctgtagtcccagctactcgggaggctgaagcatgagaatcgcttaaacctgggaggcggaatttgcagtgagctgagattgcgccattgcacgccagcctgggcgacagagtgacatcgtgtctcaaaaaaaaaaaaaaaaaaaaaagaatagtgcattttacacattactgtatctacattatatctcaaaaaaaatttttttttaaagtttcacttaaaaactcaaggagaaataggactggtttaaaacactagagccacggaaaattaaagcacaacaaaggcttaacaccggagccatggaaaacagtagtattttattttattattttattttatattttattttatttgagacagggtctcactctgttgcccaggctgggcttgctagggcacagtcatagctcactgcagccttggactcctggcctcaagtgaactgccttgaaacaccggtttgaaacactggagctttggaaaattacagcatgatgaaggcagacatgctgactgggctggaggaaaggagtgatttctcaggagacagctgggacacgtggacacagatgaaagggaagaggaggcagatagttcctgactgctccaaagataggctaaggggatcgggagatattagggatccaaatggctccatgacccctgggaggaccttgagagctatagttggtggcaccagtcaaggctgtggggtggtcccttggtgatcaggtgagctgtggacagggaaggtgtccagaccacatggtgatcataggtggggaaccgtgtggagtcaggacccttcaggaagcacacggagaatgacacagcagaaggtgacccagccaggcagacttagttagaacctgggcaggtgcggagcactcagtgtcctgcttggaattacccatggaggaggggtgaaggtagacaatgttatgtttcagcaatatgtgcttttgagagacccagaactccctgacttcatacctgccacaaatcctgaaggtttcaaagaagaatgaaaagaaggccccaggccccacaaacagcctccgttggcgcatgtgcgagagaaggagccgggccaccttgggaagcagcttccattttttaaaagcgcagctgggcccgcttgaaaggagtggtagaaacagagggggcagcagcctggaggcttgatccacggctacagggaagaagggtcagaggaaaggtttctggtgcccttgaagtctcccaggctcctcaaaacccagggagtaaaaaagcagaggagaggtcatgcacacagggcagagggcactcgggcctcgcggcactcctggggcacaggcttcagaagcttccgcttaggaatctgagaatggttttccactgagacagatgtgagaggaaaaagaattcctaggtctctccactcagaagtcggaggaaactttcagaaatgtaaagtgggtcatctcatgtgctgctttaaactcttcctagcttcttgctgctctcagattaaaattaaactctgtcttagtccattttatgtcgctataacagaaaaccacatactggataatttataaagaaaggaatgtatttctagaggctgggaaatccaaggttgggggcctgcatctggcaagggccttcgtgctgcgtccacttgtggccagaggcagaagggcagaagagtgccagagagcaagcaagcaagcaagcaagcaagcgagggctgaatcggctttcagaacaacccacgttaatgcattcacaagggcagagccctcatggtctaattacctcttaacaagccaggttccacttcttaacaccatccaaaggcaattgcatttcgacatgagttttggaggggacattcaaaccacagcaagtacttacctgcccaccaggcactgagggatggaaccccttctgccgacttcctttgaccccccagaccctcccactcgcttactgcctttctgtgtctcagatgcaacaacacttcctgcctctgagcctttgcattcactgttccctctgcctggaatgctctttgcacagcctgtcacaaatgtcagctccccaggggccatccctgacctctccatctctagtgatctccgtgcgaactcaattcctggagaaggtggtccatgcaggtcctaagacctgggaaagccacagttgaaattttgtaacttgtgcaagacgatggaattatccctgaaggtctctctctttgagaagtggcccagaggggtatggcgctggcccacatcttctccgttctctgctgtttacactctgtccttgctctggtccctggatggcgaggacatcgtggatctgggttatctgggttctgggagcatgattttgctaggataactgccagaggaaaaggagtgtgctggtattttctaacctcgggcagctgctgggaatctcatctctattgagtcagactttggaagagcagatgctccagaaatttgggctagggttaattcaacagtggagaaggtgaaagtacgacatcagcaatgtaggagttgacccaggaggtggctagggctgcagagcctgaccctggagcaagcctgttagggcctcagttccctcctctataaatgggggtgccatcttttcctgcccatctcccttccaaagttttgtagacaggatttatcaggtactccatgaagaggaaacactaattggacctcaaacattcctgggcaagctctcggcatcttcctcagccctgggcccctgcccgagcatcccccaccaccagacgggtccctggaagaccttggacagtcaacaaatcttcatcccagtttcccaatttctgtagattcagggctagctaatggcaaaatgcttcctcaatgggaaaagcagaaaacgttcagatttattgctttgagattttggtctgtctcctgggcctggttgatgcggtttcccccaagtttcagagcattttgtttaaaaagaagaatttttgacagcagtgttttgcctcacatttacacaaggttttatagtttacaaagaggttcacatcataacaatcactgctaggatgcactgagttcttacaaggggtggggtggggaggctcgattaacccttgaaagcactttccttttccatggatggaaaagcagaggctcagaggagcttaactaaggggcttgcccaaggccacacagtcctggaaaagggcagggcagagctgaacacaggtccaccagtttcaaatgttgtgcttgtatgaaaccgacatgggttgtcctctcctgtcgcacccctctgcctctcttgccttcagcctacccactgcatgccctgctgcagacagtgagtaagaaaacacaaaacaaaacaaaaccaaactcagaggcttgtgcagaaaacaggctgggatgagtataaaaataaccaggtatgttcaagggaatccttgagtccctaaacaatgtattttctgctaacatgatttatgtagtggtgcaggtgatggaggtctttgcagcaccaacagggtagttgctttctgagttctaattctgcactgtccaaaacagcagccagcagcaatgcatagctctttaaatttaattaaaatgaaatgaaattggccaggcgcggtggctcacgcctgtaatcccagcactttgggaggctgagacgggtaaatcacaaggtcaggagttcaagaccagcctggccaagatgctgaaaccctgtctctactaaaaatacaaaaattagcctggagtggtggcatgcacctgtaatcccagctacttggaaggctgaggcaggagaattgcttgaacccgggtgccagaggttgcagtgagccgagatcaagccactgcactccagcctgggcgacagagcaagacttcgtctcaaaaaaaaaaaaaaaaattagctgggtgtggtggcgcacgcctatagtcccagctactcgggaggctgaggcaggagaattgcttgaactcaggaggcagaggttgcagtgagccgagatcgcgccactgcactccagcctggtgacagaacgagactctggtcaattaaaaaaaaaaaaaaggaaataaaattaaaagtttagttcctccattgcacttgccacattttaagtattccagatccacatggggtgaccctattggacgccactgttctaagccaccagcagcctgctcctgtcttatcctggctgtcctgaagaatggagagctgttgacataggtggcaggcacacacctgttttaaggtaggtcgctttgcagtcaaggtatctatagatgctatcctaatacctgagcccctctactccactctggagcagttacagctccagggatgcaaataaaaggcagaaaccaaggcagtggccaccaactggggtcttgctactcaaagtgtggtccaaggactggcagcatcagcatctcccgggagcttgttagagaaaagcagaatctggctgggcacagtggctcatgcctgccatcctagcactttggaaagctgaggcggaaggatagcctgagcccaggattctgagaccaacctgagaaatgtagcgacaaaaaaaaaattagctggatgtggcggcacacctgtagtttcagctattcaggaggctaggtggaaggactgcttgagccctgcagatggaggttgcagtgagctatgatggccccactgaactccagcctgggtgacagaataagaccctgtgtcaggaaaaaaaaaaaaaaaggcagaatctcaggctccatgccagagccgctgaacatgaacctggattttaacaagctcccaggtgattcctgtgcacgtttgagaagctctgacttaagagacaggctgagcaggaacaaaacagtgctccaaatataggaaaccaaactgatattttcagatacaaaaaatagaatcagcccccttcctccagtagggtgtaattaagcattagtcacagagggccgagcatctttgtgccacatgaccaatgaccatacttccaaggacaggcccccaggggaaacgctgggggaagctggcccattcatctctagcactttctcaaaccacagtggggtcacctcctcaaagcagagggaacggaactgagcatccatcttggatgctgcctttaaatcagattttccatttttgcttttcttcccaatgcatttggctggtctgaccaaatagccagtcatttaaagggaggcacctagaaaaggactgtgccctgctcgtcccccttcccggggccttgaggctctgcagacctcagtgccaggagctgggtgttgatgaagctttctgggaaggagctgacatcacacccttctatgagggaagcaggtgcaaatggtgcttccatcctcagcgagggcgcagatgaggcttaaaatgagcttggcagccacaggctgacccccagctggggaaggagagggctgcttcagggagaggtttgggtgttcagattctgtggcttgcaaagctctctcctaccttcagtgagaggtttgggtgttcagattctgtggcttgcaaagctctctcctaccttcagtgaggatgagtcatcccttaattcctctctcctctcggcctgtcttgagtcgtacttatttttatccgtggaatggagttaagttgccaaaaggatgatatttctccacctgcaagggccctcctggaggatacattttaaaatattcatttttacaatttcctcccagcaatacagcagaggacaggagaggagaggtagacagccgcacgggcctggcgggggagcctggggcttggggaactgcaaagtggctttgagacagagagacattctagaagttattctgaggacataattggacaaaagtgaaaaggaggatggttaagtatgctcttcataactctctgtataatactgaagaaatcaaagctaactgtaaacagtcctgctgtttttgcctgtgcagcctgcagatcccttattttggtgatgaatctcatgtttttctctagggaacagcccaacacccattgcacagggtaatcttagggggtctgccaagccaagatgcctggctctgcccttggctggggcgggcatgtgacccaggccaggccacatggaaaggagccacagcaggatctggaaacatttggattcagccctcctgatggtggtgcctagagaggcttccctggttcttgaaggggtccctggccaagtcctctttctagcccttattgaggtttggctgtttactccttcctgagattccataagccaccccatggcatttcagtaaatccctttctgtgcttaagttgacagagttggtttctgtgatttgtaactaaaatcccagatggacacaaacccaaatgcctggcaacaggggcttagatcagcaaagtaggctacagcacacaatggaatactccacaagcacgtacagcgatgagataaacatgtatttgttgacatggaaagaggttcacaatgtacagttaagtgcaaaagcagattataagaaaacagtgtgcatagtaggataccacggtggcaaaatctatattctatatattcatagaaaaaggcctagaagaaaatataacagtattcaccccagagagtgggatggccaatgagtcttctttctgcttctattttctaatctttctacaatgtttgtgtagtcagttttcctggtttgcttttttttttttttttttttgagcacaggtgggtcatgggagtcacgctctcatgctgcctgtcaagagcatggtacttgctacaggggctactccccagcagctctgcttaagaagattctgggaatgtcttgagtctccagaacaaggaacaagcacttcctgtgcccagggaaccagcagcttcccacttcttctcacagcaaccttgtggggttgaggttttctgtctgcttgatggaaaagaagagcccagagaggggaggtacctgcctaagttcacacagcagggatttaaagccgggtcacctggcccagagccccgggggctattaaagcttatgaacagagcaagcagctgagcccagggaagggctcaacattctcccgtgatttccgctgtgttgacaagctgcaaatgtgccaggaaaggactgggtgtggtggctcatgcctgtaatccccgcactttgggaggctgaggtgggcggatcacctgagctcaggagttcaagaccagcctaggcaacatggcaaaacctcgtctttactaaaaatacaaaaaattagccgggtgtggtgacgcaccctgctactggggaagctgaggcaggagaactgcttgaacccaggaggtggaggttgcagtgagccaagattgcaccactgcactccagcctgggcgactgaacgagactctgggtctcaaaaaaaaaaaagggtcaggggaggaagagctgtcacttcagtgttaggacctgagctccttgctctgcacaacagccccagtgtttcaggccccctcccagggagggcatcagggagggtgggaaagggggctgggttatgggaagttcattcttctgccagatagtctttcggctgctcctttttatcttctgggtcttggcttgaaggtcacctgcccagagaggccctccctgaccccgtagggtaggtcctcagctgtctatctatctcctttgtagcatttcctatgacctgcagtcacttcacttacttgtcagtttcccttaccatcgctttctcccctcttgaccccttgactgcagggcttatgactgtctcactctcagcggtgtccctggcctctagcccagtgtctggtccgttgcaggcactcaccaagcatctgctgaatgatggaacagacggacactcaactggggtggccaggagacggcaggggcgagactctcctttgccttttttgggctgtgtgacctcaggcaagttgctgctcctccctgggcctcttcccaatctaaacctgagtataaataaacaactgcatctgaagggctggcctcatgcttctcgaatatatcaggaccgatttcaggggaggtaatagaagttggaatcgtttactaaattataccttaaatcaactgctggctgattattatttctgatggtaacattgcaatggtttttctaggagtcactgatgtgcaatgagcccaatcatatttcttattcaataaactcttttattctagtccacagatttttccattacaataataatgaaaatagcactagtaatttgtaacactgaggcccaaagggaaacccctcctcaaattataaggtaaatgacacaaagttgaacatagggtcagtgttgggcaaaaagcatttaaaatatagataacggggtcaagattttgtgtgtgtgcaaacactgggttttgtttttcaggatgacaccattttagaaagtgcatgattttgaaaactatatgtgtaattgtgacaaaactaaactgtagagaaaagacaaaatcaagcaaaaacaaaaaccaagaaaccaaaaggaagcaaatcaaatacaaggggcggatatgcaaacctccggtcctttggccctggaatggcaagtgagtgggcttcatagaaattctctgtagaaaggaatgtgtgggccagtgtggccatggccctggcctgacatcgctgagtctccaagtcttgtctcctcacagaggaaaagaagttgcttgtccgacacatctgctgggggtctgcccgagatggggccttcgttcccaatccctttgagaacagtctcaaatcctgaaaaggcaaggcatccctgcggcggccccagggcggcggcaggagatggggtcagtgtctgccccaggctctgccggagctgtctgagtggttcaccgggagtgggtgggcctcggtgttgaacacccagtcttccagggagagcaagtcatcttcagagaacagaagatagagatacctgtgccccacgcagggcagggaagcaagacacagtctgtcagtggcctggggaagaagggtgggcctgggaacaagtctcagggcctttgtgataggcctatggtcaaggtctggagccttgcaaccccaaaactgtgggcagcagggtgggggtgctagtcctggggaaggaggctgtggctgcagagaaaagccttgagctttggggtcagaaggacttagtttaccctggctctgccatcagccagcttcacctgcccggccctgtatgtgagcccttatggtccagattctctgcaggggtgcctgagggctgctgcagtccagttgactctcacgtgccccgctgctgcccactaagactctatattcagagtacacattggggcactgagaagaacatggggttgtgactctagaactccagcttccaggttgtgggttttttcctcactggaaggaactgatcattctgacccaccctaaagggttaaagcacaaggggcttgctttggggaacagtgaggaagtgggatggccaacttccatggcatgaaatcgaggagggcacagcagccacactgcagaggccacaggagggaaagtcaatgccagcaaccagcactgacatcatcatcgttaaccctatcccattttacacacgaggacgcggttcccagaacggaagcaacctggggagataagcgagaaactgaaggaacctgcggtatcacacggtgcgtccctagggaacttggattctagcccagtctcactctccgagaaagcggcctggcccaaggctcacacctggggtgcagccctctggatcccaagcccttcaccccttttgggctcccgtcctgtgaccacagaacctgactgtggaggggagggactgcggacccctaccctcaacctcccacctgtccatccctaggaagagcccacactgctcactttagtgtctccgctagaaagaagctctgctgcttgttgtcgtggttgggggtgctactgtacacgtcttggatcccagagaaaccggcttctgtccgacagtatttctccaaggcctgaggaaggggaagaggaggaggaaaacagccttaacacgggacaggaaaggcccctcaagacttgtgcatgcctggcaggctggagctagaagaaagcagacagcacccccaccccttggctggggactcctggcatttgtgggaacagaaggtcaaattattctttcggggtttagccacctgtccccaggctggaggggccacactccttccacccacacctctgagagctctggcccgatgggctgcctgtcctgagctcttcacctggtttgaacttagaggaagcttctctttgtgtttcaggggactaggctggtcttacagattcacccacagtggtaggcagaggtgaagagaagccacgggtgatggccatgggctgggatttggggacggacttggtactccagggattctcaggagagatggcccctgggctggaggcaagtgagccaagccattcatctttctatataaatgcatttttttttcttgagacaaggtctcattttgtcgcccaggctggagggcagtggggcgatcagagctcactctgcagcttcaacctctgcagttcgagcaatcctcttgcctcagcccctcaagcagctgggactataggcgtgcgtcaccatgcctggataatttttgtatttttctgtatagatggggttttgccgtgttgcctataggctgataaatacaatttctacccacggagggggtctatggactgggcataggagcacaagacgcttggcctttgaaggccaagaacaatggtcctggggaagcaggtggacttaacagggccagtaaacctgagcatgccctggaccccgtctgagtgcaatgctcggaatgggcacgggggtggtgggggagataggggcagagaaggctcagcatccaccagggaacctgctggaatccccacacctgcctttgacacctcccccaagacagccattaaatttccacctaggtgtggggccggaggctgagggcagggtaggcctcaagggccagtagagactagggtgggggggtccctcaggctgggctgcctgtgggaagaggagggaggtggaggtgagctgcccagcttcgagatcaggaaagcgtctgttgggacagcggtggccgcgtggtgcctgcgtggtgctctaggcagctgcctagcctctgaccctctaagtttgctgaggcctggtcccaggccccaaggatatgggcactcagaaccctcttcacaagtctggcctgtcctgtctcaggacaactttgcccagctggggactcttggctctgtaaccaccaccttgaccctttgcactctgaactgtggtcagaggtcaacgtggcttggccttccactccaggcccaagccagggcacctagcacccagcctgtaaattctcaggggcatctagcaccttgctgcccatccctggggcccactcaccagcaccacctcccagccccactccctgtagatggggttgtgggtctgtcgccacaggtacatgtagctctccaccacctctggccggaggatgtagtagctctcgctcagctgggtggccacggcctctctgccggagttaaaccagaaggcctcaggcccaagtttggtgtctggggaaacagccaagcagagggcccaggtcagacctcccacctcctgcttttcgggatccaggagagatgtcagttgccttgaacccgcggccagggtgatgtcaggtgtgtgtgggtgtggggtgcccctgcctggactgctgtgtaaggctgcaccgggcagatgcacagcttccctcttggcctgggctggacagaacaagaccctcggggactggaaatgtgagcagctttggactctgagagtccaaatgagctactcagcagtctgggtaggtgaaggtttgggcggggttccacaactgtgtactttgaggcaatagctctgcaagaggttagccagacctcagccaagagggtttcgggtttcaacacatctggggaaccgagggttaaacaaaataagtctcccatctgcaggatttatcagatcctttaatatgctaatgtgaaatgaggcttctccttgggaccctttgtcttagaaaactgcttttaacacctcccagaacaaacttcgagagtttgggaacagctgaggtagagatggagggaagattgcccaggaatgcacctactcccacagagggagctgaggaaggagggcctgagggagcctgggttctgtcattgtcactgtttggttttgaggcaatttgctgtcattcttgtcatatggccataattataaccacctctgtagccactatttatgatttcaaaggccgtgctgggtgctttaatacactatttctatccttaaaaaatgtttctttagtaaggtaattgctactatccctctcacgcatgtggaaactgaggatcagagaggctaagtaatttgcccaaggtaacacagcgagttgtggctgagttgggacttgaccctggatgtgtctgatgcctctcctagggcggtgctctttccctcctgggtctaaccctcataggcccaacatgtagggtatgagggccagatccttctccctttaatgcctgtccctcctgtccaggtcacccaagtccccagctccattcctaatgtgagccctcttccctactaccagggttcaaaaccctgagaggccctaggttgcttttactttagaggcaggggttagaggtttgcaggacttcctgctcttccatggagggcttcagggaagaggaattagctagaccctagcctctctaaccttttcaaatggtgtagcggctcctggccatcagaaaacagtcattttgccaagtcgctagtggggtgaaggcaggagccactgctacaggcgtccacaggacaagccgaggctggctagaacaatatgctttattaagcggctgtcttttatggtctgggctgattgtctcagacaaatagcgagccttttattagtcctgagatttcttatttgtttatggccctggcagagcaagctctttgaagagaatggacaaccagttttaaagacccattgcgaatctctgacttcctggaaacagctccaggagaccccattcagctggggcgggcacagacacatcatgatgggcggtcagcaagtgcctgcagtgctgctggccaaaggtggctgccaaggtactttctcatgggaccctgtgcctcactctgagacctgtgtcatgattcccatcgaacagataagaaaacagaggctgcccatctggcctctctaatcttttcaaatggtgtagcggctcctggccatcagaaaacagtcattttgtcaagcgctgcttgagcctgggatttttactgcaaatcttgggtcgtcccctccaaccaacactgggattaccactcagagcggtgggcgtctcctgggaccacacgggggctggggatttttctgaggggtgcagtttgcgcacggggtggaaccaggcatcagaaggcctgggttccagcccaggatcaattcctcatgtgcagtgtgactttggctaagtcacttcccctctctgggctgactccacttctctgtgtagaatgaggagccaggctcaggctctcaaatgtgacctctgattctagcatcggacaattcagtggtgagtggtgggtggggaggaccaagctctcaggctttccggtgatcatgggtcaaagagggcgactaaacaggtgggagcaggaggcggtgaaaccccctctaaggagggtgccgggggaaaggcagaggcacatttgaaagtaggagactcagggtgggacatgtgccgggctcaggaagccgccgtttctgcctccggggctggaggatcctttactctgtgcccctctcaagggaccttggccaagtaatctctgagcctcagtttcctcatctgtgtggtgaggttcagtgatgttgtgtcaagtgcggaagagtaccaggtacatgcaaagcgcttcctgtgtctgtactagtttccctttcattcagggtatggtctcggagcctggagagtacctctctcaaattctacttaacttccaaggggaggcttccctaaggccatgtgctcccttcgctcactgctgccggtctttccagttcttcctggtgtctagcctcagtctctcctgctgccccttccccttgcagggttacctgagcgggcgtatgactcgtgacacgtcttggtgatctgggctgcgagctctcggtagtgggccctcttttcttccttggcatcctcggcgccaagggcgatcatgcccccggagaaacaggccaggtgccccatcttgtggtccagaatcccccctcgccactcggcaatgtaggtcagccccccgggagagacattcagcaagtaggtctctatcgcctgggagcaaggtggggattgggcagggagaaggggcgtgggagggcacagagaagggggggaaaggatggaaaatgaacattttggagacagtagcaagggcagctctgccaagccctccatcccaggcaaaggaggcccattgatctctgctggtcaagatgcctgccagggcacaggaggggctgctattcgctgggaggctcagacacagggcagctccccagggcaagtctcttacacagcctttaaaatcttccatgttttaaaaaacgttaaaaaatattttaaggtgatcctcctcctccattatgtcctctgtttgatcttaaccagaagcccagctggcctgtggatgggcttcaggggtccaggcccttaaaactgtacccaacactttctggtggatgtgcatctttatgggaagagtgtccatctattcttaccagtttctcaaaaagaacctgcagaaaattaagagctgttctctaggagtatcttgtcacacgtttcctcatttaatgcctacagcaagccaggcacctgggctgccgcgccctacacagacaaatgggaggtgtggcagcttgtcccaggccacccagccacaccagcctagaaacaagaccccacaatgtccagagctctgcttcttccactacctgatggccatgccttttggtgggaagggaggtgatgctgttgtaaagactctgggatgtcgggggcgtgagggggtcagactgctctcaccccaggagccctggggaccaaggggagggaggaagctgctcacacagtctcgaggccagactccatgggctggtggggcctggcccatggctggggtcctctggggcccttccaggcctctgcctccactttcacccctccaatctactctccagggggtctctgtactctgcaattaacaaaccggatcatatcatctgcctgcttagaaccttcagtggtttccaagtgcccttatgtgaaaacaccagaggggcctccaagactccacgatctggaccttgagggtggacctgattctatggacatggctctggggcacagactcatcaggttcaaatttcatctccaccagttccacgctgtgtgacactgggcaggttgtatgttctctctgtgcctcagtttcctaacgtgtaaactggggataagagcattaactgcctcatagggttgtgagaattaaatgagatatgcctgcaggacttggcctatttcccagcacagagcgagtccccactaattactgacccctatgattccactctagtctgtctcctgcccctccctcctcacaccctacctcacctacactggccttttttcactcaggtaccctcctggcttacaatatctcggcagccatgtaatatttccttggtgtcagcgctgtgctaggtactggggctacaggtgtgctggagaggagcctggactctgcctcagggagctcacccattagtgcagagaattcccaacaaaaccaaatatatatgagaggtgcaattcgttttgttttgagacacagtcttactctgtcacccaggctgaagtgcagtggcatgatcttggctcactgcaacctccgcctcccaagtttaaaccattctcgtgcctcagcctcccaagtagctgggtaattataggcgtgtgccaccacccccggctaatttttgtatttttagtagagatggggtttcaccatgttggccaggctggtcttgaactcctgacctcaggggatccacccacctcggcctcccaaaatgttgggattacaggcgtgagccaccacaactggctgagaggtacaatttgtgatcagcattttgaataaaacaaagtgagaggatgagattaaaaaatgcaggggtatgcggggaggggctggacgcagtggctcacgcctgtaatcccagcactttgggaggctgaggcagatggatcatttgagcccagtagtttgaaaccagcctgggcaacatggcaaaaacccatctctactaaaaatataagaattagccaggcacggtagtgcatacctgtagtcccagctacttgggaggctgaggtgggagaatcacttgaatccaggaggcagaagttgcggtgagccaagattgcaccactgcactccactctgggcaatagagtgagactctgtcataaaaaaacaaacaaacaaaaaacccaagaaaacaaaacaaaacaaaaaaaactggggtgggggcagtgctgtactttgcagagggaggtcagggaaaatctctctgcaaaggtgacattcttgaaagctgcatttttcttcctgcttcggggcttagctggtgctgcgcctccttcctgcatgctccagccctgactctgctaaccccacctcctccagaatgtcacttccttggagagaatgccccaatttaaaccagcactgccactgccattacctatgggcccctgtcacccttctacatggtgccattcctacttggcatctgtttctgttgtatatctgtctctctctcagactctgagtgccgtgtgacagcagaagccaccagcagcagcctccagccagtgcccgacacacagaagatgctcaaggaacactcgctcactcctgggtctgttttttccttttttctctcctgtcagggcccagggctggtgggctggctgcaggacccacactgagtggcagatggaaaagcgctgacaatgtgacatgccagggcacctgctccacatgggggagtgctgaggacacctgcagagcagccgggctgcaggcaggggtctgctctgggcccggcctggctcccgggcagagccatgtccctggcagctgctcggcgtcactaagcctgcggtgcaggggaggagtgtcagggctcagaaacctgggtccgagtcaccagttgtcaacactttggagagaacacagacatctgagggagacctcaggatgctgcgcaccagacctggcacctgcaccttccagaccgcctcccacacattatttccactgggggttggccccaagctaagtaattgcagtcaagaggaaattataaaccactgcctctttgaagacacaactgagacacgcagatgcaaagataaaaaacaaggctttctaaaacaaaacacaagacagtgcaggctggcagacgactggtaaaaggtttaaatcacagcaagcagcggtgcaaggagctaagtggggcacaagaccagggttttttttttttaatgtattaacaaaaatatttgtgctgttccttgtggagcagggctaacccataggcagtgagcccagcgtggcgagaggcctgggtttgaatctcagctctgcgatttaggagctagatgaccttgggcaagttatttcactttaatgaagactcactttgctcatctataaaatgggagtaatgattcctgggttggttgtgaggattaaaggagaggatattcgaagcctggctcagtgcctggcgctggctgttccttcctttgccgcctgcaggagccccatctgagcactcgcgggaggggtttcaggcaagccaggcccctctgtgatttggctgctggtaagtagaggccagcccaatggatctggagtcagacccgtgtttgtgtcctggctctgacacttgttgctatatggaccttgggcctttctgaccctcagtttcgtcatctgtaagatgggggctaaataagatgaggtacttagagcactagctcagaggaggccaaagtgaccaaagctcttcctgttcttcttctttgtctcctgccgtgacactcaggggtgtgcccagtccgatctgtctgaccctccccggtccatcccagctggacactggtctaacctggtggttttctgaccccaggtgcacaacagaattgtggaaggaactttttaaaaatctcagattgggatttattggcctggggtgaggctagacatgggatttttaaagctctccaggtgatcctaaggtgcaggcaggggtgaaggtctttggtgggtggttcccaaccctgactatacacgaaatcccaaggaggtttatgtgtggcccgggcccagtgcccagaggttctgagtcaggggtgcagtctgaacatcaggactttgcagctccctaggtgattttaacatggcaacaaggttgagaaccaccagaaaattcttcaaaaccccaaacttgccagaggcccagccttcacccagggtcaaagatgctccaggctcttcactgggaagatcaaatgcagagagcaaagcctcttctattcaaagttctctcctacaaaatcaagtgctctgagtttccttaaataattcatggccatttcttcccttgatggctcaactactgtgtgccctgagggcagggagcctggctgctcattaactttatgtttactctgcaagggaaggcagaaagggcctctgggcagcacactccggccaccaccagctgcacactaattctctgaccggggctctggtctgagctcagccaaagacaggagtgaacaagactgggacccagactgagatgggactgcagtcccagaagctgcttcatgactgaggtcttgtgccagggagctgagcagggaaaaatcattactgagcctacagtttaaagggtccatggctctagcagtccgtttcaatgtgtgtcttttaagcaccaccattcctggccagattcctgtgatcagagggtagtcacagaccatctatccatccatccaactgcccacacccacccacccatctatctactcacccatccatccttccctccatccatccttccctccattcatcctttcagcattcatgcacccatgcattcattcattcacaaaacagttaccatgggcctgctatgtgccaggcactgttttaggagcagacaagatctctgatcccagataactgatattctatttggggaagatagagaatgagcaagtaaacaaatatgtgcctgtgataattttagaggctgatgaaggtgaagagaataagcctgagtatgtgacaggctgggaatggtagtttcagtggcatttgaattgagagttgactagtgaaagggacccagccattggaatgatattccaggcagaggggacagcaagtgcaaaggccctgaggtgggagtcgcctggggtgtctgaggaagagcaggaagactggtgcccagggcccagagagcacagagcagagaggcaggcgtgaagtcagggtgatcagcagggcccagggaaggcggacccgatgggtaaaggagaggagttggatttattccaggtgctaagggaagccagagaggagagggatgtgcgtgtccagctcttctggcttctgttccccacacagcattcagagggcagggcagaggggaagccagtttagagaaaataaggaggtagtgtagaccaaggtggtggcagagtagatccgacttgctcaacttgctttatggggaaactgaggcccagaacaggcccagtgccttttccttagttgggctccaaagtatctgttgagtggtgggattccttagccctcttcccaatggctcaggctaactgattccctctttcgtcctcgtctctcctctttggaaggactcacctcagccttccagccctcgttcattccacaccccgcggacagaccagcagtggtgccagcttggccagctctgtgctgtgtggccttgggcaagtgccttcccctctctaggccttggtttccatccacacaaagagaaggagcaaaactggatgctccactgaaggaggcctcttccagcttggacatacttctcatgtcacctctactgtccaaggaagacacagctgagggtctcactctggcagccacccttgggggtgccagcccacagtctagctgcactctgggctctgatacatcagccaaagcatagacaccaagcaggtggtggtttctgaatcagactgacggtcacttcccgtgagaccttggataaatgacttcacctcccagagcttaggtttcacatctaacaaagccccagtcttagagcatgtgggagggtcgcagggtgtaaaatgcctggctgggaggggactgtcctgtcaatcttctcaccggttcattgcagggggtgggagcaagtctcggcccatctggccccgctgcccgcagcaccctcgctcggccgtgagagagccgggggctggtgaccagcggcctgtgaataatccagggcttgtcttacctccaaggcttcgtagtacatatttttagcctccatatctgtcttgcccgacatcaaccaggatttgatcaaatattcataaaaactgtccccgagtcctccaactgagacatggtctgtgaagggaaagaggacaagaacattatctccatctgccgccggctctcacggggcagggcctcgcacacccgcctgacctcaggggcccggtgcctgtacgggtaggaagcgggcatctcgccagcagccaccgaacctggaatgggtactgcgaggcagacacagcctgcgacttggaggaaaccagggctgtctagagagcgctcatcctgcacaaaagtgcacgggctcatccggcgggtgctataaatcacctcgccttagcaggctggggacggcagggcctctggttattaactgtaagtgagttgcatttctttacaaagataatctggtggcagggagttcagagatttttattacccagtgacaaacatgataattaatgctgggtagcttcataaaaggccacgggaaagaggaagaaaaaccttaatttagctggccaagccctcaagtagagccactctggaaaaacagagtttaaatttagcaaattgagataaatggagttcaaaggagcgggaaagagaagaattgagttggaacaccccctctctgccctggtggcctctgcctgctggacagtgggccagccaaggagcagggcctcacaggctgtggctgaaccagaggtctctccacccagggccgtcccaggaggaagacgggttgcccgaggaacacttcaccgcagacgcaagacagaaaacacttcgctcccaggctttgaaaattaacaacagggaaacgtaaaggcatttgatagatttaacaaagaacaaaccagttctgtgttctgattcacttaagcagagagacagagagaagaaagaaaatgggggtggactgaaggcggggcggggggaatgggcagagtgttttcaactcctcagcagaagaagggggcagacagagaggggagaaggaaagtgggcggggggaagagggacagaaagagagaacacgtcaacagctaccatttattgtgggccaggagcctcaatgtattatttataacttaatcttcctgggcaccctgcaaggcaggtgctatcggccccatttcccaggtgggagaacggcaactgggcctaaatggctcatccaagaccatcaagctggtgaaaggcagagcctcaccttccacagctgcacaaagtcaaccagagagtgaagacagagatacgtagagaaagaaagacaaatgtgaggaccaagggaccaaaagacagggcaaagacagatgggacccaggaatgggggtcgagaggaggccagccacatggtacactcgcccttccggccccctccagccctgatccagaaataagtcctggcccagcaagtgttccagagcggaccagcatctgcaaaaattggaacagacaagatgaagcatgtgctttggggaggagctggaaagggctggggtgggctggactatgctctggtgtggagggaagagagaagtggcacctctctccttcctaggtgccccacagaagagaagggctgggccaggcctggcatgttgaggaggggcaggtctgttgcagaggaggggccggggaggctggaagtcatgggttgtcctctgctcagagcccttctccagccccgtcatgggcacggcagctacgagcactgtcacctctcggtgtggcgcaccctccccacctcattccccacgcgggggctcaggcattctcacaagcctgctcccggtccctccccatagggtggccacggggattaagtgaaacaaggccaggcaccatctgaagccctcggcggcagcactccccttgggtggtgggccccccttgccatcgggtgcccgccgggtgtgcgatgagtgcctgcgtacgggtctgcctccctcactagctcgtgggctctttgtggggagggattgcatgcgactcccgctctgtgcccagtaactacacggcgcacagagatgcccatggagtgctgagcaggtgaatggaagggaggcctgggctctgccgggatgggaggcttgggctgtgccaggaagggcctggaatgccaagccaaggagtttagccacaatcacgcggtggtggagtgtgtgcgtgacaaggtccaggcttcctctggaggggcacgcaggggagggagccaggtcattagggtccgcggtgttgagatgcagctgcctctcaggggcacttatgtgggcatctcacatgtgaaagtcccactgctttacagcttgtgtgtgtgtgtgtgtgtatgtatgtatggggtgtggggtgagtgtgtatgtgtggtgaatgaatgtgtgtggtgtatgtaggtgtatgggggcgtgtgtgtgtgctgaggggtatgggtgtgtggatgtgtgtgtagggagagtgtgtgtgtgtcaaggagtgtggtgtgtagtgtatgaggggactatgtgtagtgtgtggggtgtgtgcatgaggcgagtgtgtgtaatgtgtggggtgtgtgtgtggaatgtgtgaggggagtgtgtagtgtgtgaagggagtgtgtggtgtgtgtgtgggagggagtgtgggtgataggtgtgtgtgtgggagtgtgggtggtgtgtagtgtgtgtgggagtgtgggtggtgtgtagtgtgtgtgcctgaggggagtgtgtagtgtatgtatatgtgaggggagtgtgtgtagtgtgggggtgtgtgtaggggaagtgtgtgtgtgtagtgtgtaaggggagtgtgtatgtgaggaaagtgtgtgtaatatgtgtgtggtgtgtgtgaggggagtgtgtgtagggagagtgtatgtaatgtgtgtggtgtgtgtgaggggagtgtggatatgtgtgagcgcagtgtgtgtaatgtgtgtatgtgtgaggggagtgtggatgtatgtgaggggactgtgggtgtgtgaggggagtgtatgtagggggagtgtatgtagtgtgtgtgtgttaagggagcgtggatgtatgtgaggggtgtgtgggtctgtgtgtgtgggggagtgtgtaattgtgtgtgtgaggggagtgtggatgtatgtgaggggagtgtgggtgtgtgggtctgtgtgtggggggagtgtatgtaatgtgtgtgtggtgtgtgtgaggggagtgtggatgtatgtgaggggagtgtgggtgtgtgggtctgtgtgggggagtgtgtaatgtgtgtgtgtgaggggagtgtggatgtgtgtgaggggagtgtgtaattgtgtgtggtgtgtttgaggggagtgtggatgtatgtgaggggagtgtgtgtggggggagtgtatgtaatgtgtgtgtgtggtgtgtgtgaggggagtgtggatgtacgtgaagggagtgtgtaatgcgtgtgtgtgaggggagtgtggatgtatgtgatgtgtgtgaggggagtgtggatgtgtgtgaggggagtgtgtgtaatgtgtgtatgtgtgaggggagtgtggatgtatgtgaggggactgtgggtgtgtgaggggagtgtatgtagggggagtgtatgtagtgtgtgtgtgttaagggagcgtggatgtatgtgaggggtgtgtgggtctgtgtgtgggggggagtgtgtgtgtgtgtgaggggagtgtggatgtatgtgaggggagtgtgggtgtgtgggtctgtgtgtgtgggggagtgtatgtaatgtgtgtgtggtgtgtgtgaggggagtgtggatgtatgtgaggggagtgtgggtgtgtgggtctgtgtgggggagtgtgtaatgtgtgtgtatgaggggagtgtgaatgtatgtgaggggagtgtgtggggggagtgtatgtaatgtgtgtgtagtgtgtgtgaggggagtgtggatgtacgtgaggggagtgtgtaatgcgtgtgtgttaggggagtgtggattatgtgaggggagtgtgggtgtgtgggtctgtgtgtgtgaggggagtgtgtaatgtatgtgtgaggggagtgtggatgtatgtaaggagagtgtggctgtgtgggtctgtgtgtggggggagtgtgtaatgtgtgtgtgtgaggggagtgtggatgtatgtgagggtagtgtggtatgtgggtctgtgtgtgtgggtgtgtgtgaggggagtgtgtgtgaggggagtgtgtgtaggagtgtatgtagtatgtaatgtgtgtgtgagggaagtgtggatgtatgtgaggggagtgtgggtgtgtgggtctgtgtgtatggtggagtgtgtaatgtgtgtgtgtctgggagggtgggtggggtggtaggggtgtgtgtgtgtgtgtgtggagtgtggacgtatgtgagggtagtggtgtgtgggtctgtgtgtggggggagtgtgtgaggggagtgtgggtgtgtgaggggagagtaggagtgtatgtagtgtgtaatgtgtgtgtgtgaggggagtgtggatgtgaggggagtgtgggtgtgtgtgtatgggggagtgtgtaatgtgtgtgtgtctgggagggtgggtggggtggtaggggtgtgtgtgtgtgtgtacgagtgtggtcttccccaacactgcgaggcgggctgggagaagcacaggcataggaatgagaagacattgttctgcattagctcagggtgcacccctgcccactctgggccttggtctccccatctgcagatgtgtgaagggggcacgagctggtgtccgtgagccccagagcagaggcaggctctgctgcttcctgaccgtgccaatgcgctcgtcacacctggcagcaggaggctgggccacaagcctggaaatcagccgatctgatgccagggaagctgccaggctgcagctcacactcctgtacctaccaaggaggtctggacttgccacttccctcccacagaagaaagtgtgggattcaggcagtggacaagttactcaggtgccgcaccgaggggctggtgacccctcctcggcagctctcagggggttggcctcagggtggtctcatttgtgttgggcaccatcgggagcctggtggatttatcctggatgtgaactcttagcaataggacgggtcttggggctcccctgttacccctgaagctcggtttccaggaggagtgggaagccaacaagagcagaggcctaggtaactgagatgcagtcctaactcctccttcgtttctctaggctgcaatttctgtggttgcaaatgggctacgcagaacctgcctgtcctgccttcaggcttgttctgaagattcaagaagagaaaatgatgtgcgtgcacttaagcttatgcaaggtggtaatgctatcaagtgctaaaagaatacgtatgcaccaaaaaaaaaaccaacaaaaaaccacaggaaacctgagatgaccccgggcaccaaggccaggggaggaggaaggcagacgtttgggcgagctgggcattataaccccctctgctctttagcaggccgagggctcagattttattaataggaaacaatttcccatatgcgactgactttgcccagacctgcaggccctgactctgcctgagaagaaaattatgcttcccggcaggggctcccttataatttgccaaggtaactgttgagctaggaagcccacacccctttcagcccttttcatgggttctgctgccttgccctggagcagctcagaggggtttatctccttatccagtcaggtctcgcaattaaaaccagcaactgttatcgaactgcctcttcccgtggctataatctgcaattcaagcttcattttctccccgtacttttggattcggcagtgtgttttggttaaaaatactctgcatttctctaagtggtttttacgggaggccacttggggtgaggtcgtccctgggggaaattcctgggttgagttttctgggggaggttcaggttggaaggaaaggcctcagctgcttcgccacagtgtccccaatgctgcctctctaggccccacttgcattgttcccttttgggacaacttggaccatctttggcagatggaagtgaaatctgtttcctgcagcctttgaccattcttcctacgcccctccatggcacacaaagaatgcatctcattctcttctttcattttgcaggacaggaaaccaaggttcaaagagatacagtgaattcccccctaagccacacagtcattagactcatacccactttgcccctgagcccttgctgatgtcacaaaaactgggttggaggcaggggaaagggaagggggtccttgtttgcacacagacagtgggggtgggggctctgccaggtcttgggaggccctagaggcagtgcccacggaacctgtcactgccagttccagctgaccatgaccatgtgaccagggcctgcctctgcttcccagagctgggcttctcaacaggcatgcacattccagaggcctgggggacttgtccacactctcacacctaagcgaccccaaaccccattctgttgcaatgggtagggctgggggcttgtgaatgatgttccatgggtgactggctgttatctggctgagaaacaagtctctgaacagagaccttctgaaaactctgggactgattcttgtaggtctaagatgtatagatgaattcatgacgtcttttgtttttttttgggacggagtcttgctctgtcgcccaggttgaagtgcagtggtgcggtcttggctcactgcaacctccgcctcccgggttcaagcgattctcctgcctcagcctcctgagtagctgggactagagacacgtgccaccacacccagctactttttgtatttttagtagagacagggtttcgccatgttggccaggctggtctagaactcctgacctcgtgatccgcctgcctcggcctcccgtcaggtgcttggcctgaattcatgatttctacactgttgtatggtttttgtttgtttgtttgtttgtttgttttttaaattaaagttggagccaggcgtggtggctcacgcctgtaatcccagcactttgggaggccgaggcggttggatcatttgaggtcaggagttcgagaccagcttggccaacatctctactaaaccccatctctactaaaaatacaaaaaaagtagccagacatggtggcacatgcttgtagtcccagctactcgggtggctgagtcaggagaatcacttgaacctgggaggcagaggttgcagtgagccgagatcgtgccactgcactccggcctgggtgacagagtgagactctgtctcaaaaacaaaaaaacaaaaaaaaattgaagttggaagtggggagcctgatcaaagaggcttggaaaggatgcctggcctctcttggagccacttctagaatggatgactccacctgggaccctcccgagaacctggggtataatgcaggaggctcccgcagcagcataagagatggaaggctgcgccattgatggggccagagaaggtagggtttggaacgcacagggcaggccttcagtaaacagcagccatcacatccggcactgcagcagcagacaaccacaggcaagcccccaggatgcatgggaaggcaggtggtgtccaggagcaccgagcgaatgccttgctggctgcatggctctgacagacacatcctcactcagcccaggggcctggcagggtcttcctaggaagcctgggcaggaacccgctgaataaggggcagtggcgtctctgtactcacgttgcacccagttcccactcactgggctgaggaagttggggtagaggccaaagggcttttcgatcttcctgaggaccttgcggatgttcctgacctgccgagagacggacaccaggtgagccttcatgcttccgaagaagccgactgcacccagcctgctgaggatgggaggcagctggttcagatgcatggaggaaaccttatgaggaggcaggaagggagagctgcccaacggactgcaggctccaacccggggatggtgacgtggccttgccctggtgccacgtgaagggtgtgacagggcctgatccatagcctctccactgactgctctgcctggcacctggacagtctcaaccccagaaccactgcctggccgactcctatcccacccaactctcaacacttcctcattgcttgctgctttaggggtactttgagggattcttttggggagggttttttttttttttttttttttgagacagtctcactctgtcactcaggctggagtgcagtggcacgatcttggctcactgcaacctctgcctcccaggttcaagcaatgttcgtgcctcagcctcctgagtagctgagattacaggcctgtgccaccactcctggctaatttttgtatttttagtagagacagggtttcaccatgtcagccaagctggtctcaaactcctgacctttttttttgagacagtctcaatccatcacccaggctggagtgcggtagcgcaatctcagctcacggcaacctccacctcccgggttcaagtggttctcccgtctcagcctcctcagtagttaagactacaggcatgcaccaccacacctggctaatttttgtatttttagtagagatggggtttcgccatgttggccaggctggtctcgaactcttgacctcaagtgatccaccagcctcggcctcccaaagtgctgggattataggcgtgagtcactgtgcctggcctagggagggttcttttaaaggtggggttaattgacagtagctcgtttgttagctttaggtaaaattgccttgttaataggtcaaaaatggtcaaatccagcaatcccactattgggtatatatacaaaggaaatgacatcagtatgttgaagagattatctatattcctgtgttcactgcagcattattcaaataggcaagatgtggaatcaacctaaatgtccatcaacagatgaatgaataaaaaaaatgtggtatagccaggcatggtggctcacgcctataatcccagcactttgggaggccaagggaggtggatcacttgaggccaggagtttgagaccagccgtggcaacatggtgaaacccccatctctactaaaaatacaaaaattggccaggcgtggtggcacaggcctgtaatcttagctactctggaggtggagacacaagcactgcttgaacctgaaggtagaggttgcagttagcagacatggcgcctttgcactccagcctggactctgtctcaaaaaaaaaaaagaaaagaaaatgtggtatagtataggttaggggtggtggctcactcctgtaatcccagcactttgggaggctgagttgggcagattgtttgagcccaggagtttgagacaagcctgggtaacatggcgaaactgtctctacaaaacaaacaaattagctgggtgtgatggcacattctcatagtcccagctactcaggaggctgaggtgggaggattgtttaagtccaggagattgaggctggagtgagctataatcgtgccactccactttagcctgggcaacagagtgagactctgcctcaaaaaaaaaaaaaaaaagaaaagaaaagaaaagaaagaaaatgtggtatacacaatggaatataattcaaccttaaaaaagaaagaaattctgtcatttgcaacatgtatgaacccagaggatattgtgttaagtgaaataggccagtccagaaagacaaatacttgatctcacttataagtgcaatgtaataaagttgaactcatggaagtggagagtagaggctgggtgcagtggctcacccctgtagtcccagcactttgggaggccgaggcgggcagatcacctgaggtcaggagttcgagaccagcctggccaacatggtgaaatcccgtctctactaaaaatacaaaaattacccaggcatggtggtgggcacctgtaatcccagctactcgggaggctgagacaggagaatcgcttgaaccgggaggtggaggttgcagtgagccgagatagtgccactgcactccaggctgggcgacagagagagactccgtctcaaaaaaaaaaaaaaaaaaaaagaagtagaggtagagagtagaatggtggttaccaagggttggggagatgctgatcaaaggatataaaatttcagttaggaggaataagttcaagagatctatggtataagacatgatgactgtagttcataacaatgtattgtattcttaaaaactgcttagtgctaagtgttgctaacttaagtattcagaatgcttaagtattctggccatttaaaaaacagttaagtatataaggcaatcaaaaaaaggtccaatattggcagtttcatatggcccaatctagtaatatgctattttatctgatgccctggaattatttcgggggagaggcttgggctcctgaataaccccatgtcctaacaggcgtttcagtgttttaataaaaataataataattataaaaagcaataacagttgttatcctttttcagttcctttgagccagatccgttatatacattatctccaaccctcataaccgacaagggattatctcagtgtaacagacaagaaacctgaatctcagagaggtctggtgacttgctgatggccacctggtccttaagtggcagagccaggacgtgaatgaattctgacaacataaaccatacatattcctgcccaacacagggcagcactgggccaacacagatcagggccgtgaccatggagcacagcctgccccagctggagcagaaagaggctgggtttgcaacctttggggctatgaaggtgagaagtggaattcaagagggctttatctatagtgcctgctctccgacagtggttaaatcctactcagcacgtcctagccagcacaagaccccttgggagagaaaggcccttgggaccacactgtctcatgttgatagagttatgtgtgtacggggccgggagtgcgggagagccacctttctgcaggcagaccttcctttccaggtgacagcacttggctttgccacgtcagatttcatatccatttatgttaacgaagtccattacggggacaggaatgtgcttgtacctgcgttactctcgactgtcctggtggtgagcagtgaagcaggccaaattagctcccctggagggtgcgggcgcttctagaatttgggccaatttgttgactgccaataattgcctctgtgggaggcatgattgggggatgaaaatagccagagtatgtaaatgtagaggagacagagatagacggatggactccagagcaaaagcctgcagcctgctctatcaatctggtctggaaggagccagcacatcctgggcttgaatcacggctttatcactgaccagctggaaggcccagggcaagtgacttgacctctctgagtcttagtttcctcctctgtaaatatgggaactccaggaagacccacctcatagggttgttgggaagagtagagccattataaagtgcccagcacatagcgggtgctcaggcaggggtagctattactccagaataaccagggactggagtgagctccctgtcccactccattcggagctggtcagaaccttcctagaggagtctgatttaagagcaatggcaacagggaggttgggggatgggacttggaggtgggaaaggatcagaaaataagagctaccaggaagtgaggttgaactcattccacgaactttcaaatgggggagtttcagggaggcagagtccctctcaatgtaaggaaaacacttttgaaggaagggctgccaggaggacggactgtttaagggtggcggcagtgagctccttgtcagagaaagtaatcaagaagaggctgaacagctcttcttgagcttcttaaggacactcaggtggactcctacattgagtaagtagtggtcccaaaccatgcgtcaaaaagcacatgaatgcatattaaaaatgtagatgcctggccctggagtgaagcccagaaatctgtttcctcacagctgtgccaggtaatgctttgaggctggatggcgacatgatactgggagccatggggtagctgtgggaatctatcatctcccagttgcctgctgggagccgtggcatagaggtgggaatctatcagtcatctcccagctcccatactggtctaagaggcgggcattccagggggaagacaaggctttgggagtggcactgccacagagttctccttggagggctccagaggatgggcagggcttccatctccccaggcagccctcagggagggactgtagctgctggagcctgagtgccatatgagggaggtgtgagcacttcccttctttggatttgaggtcagacctacagcgacacttctagctagtggggactgcccaaggccaggtatgagcagctgtcagggctgattggtgttctaagctccccatgtggccttaaacagcaggaatgaacagtcagggcatctgccatggcagggtattgccatgccagcctgctgatggcatgagctaaacaggcacagggaagaaggcaggcagatctcacatggaaaagctaaatgtctctggaaaggggacttctgcagtgggtggccaattcctgccaatgcaaggtggtgcctagatttcagttgcactttctccagatttcacatatgggtggttgccactgagctcacgcagaccagtgagaaccttttccccggcagaatcttgtctctccttttccctctgtagaatcttattgactctgcgtgctcaccttccctgccacctggcgttggggtataggtagctactatttgctaccttagtggtagcttgggctcccgggctccccactgccctcctgctgatccatgagggaggacccactcgcctctgaaaaccctgtggcagccgcacgctcatccctctgctccgcaggaagaagggtggggaggagacttgccttttcagcgaagacctggttgccagagagttcagtgaggtgtaagaattccaagtgcagggatccaaactccgccaagatgctgctgctgccggctgtggcccagccccagttcccactgaaaagacagaagcagcccccgtcatcccccctttggccaggctggctcctctgctgacagtaacagcagctgctcggtgggggcacctactatgtgacaggcatggaaccaggagctttcgccgtacaatttcagtgaatcctccctggccccatgtcctgatgaggacactgagataaagtgactcactgaagttcatttgaacccaggcctgtctgacttggaatattctttgtctccatcatcaagcaacccctgtaagacttgggagctcgagacctggtacaagagttatgctgaatttacagatgatgtggataatgctatcaggggccacaaagaccccacagaacacccggttgctgtcctctggctgaaggcaccggatggctcacaaccattggtggttctgcatgtggaggataaacagtgctgtgattcgggtgcaaatgggaccaatgaaaagcagagtccccgcctagctctttccctctcccagcacactgtcagtgctgcccaaggacatgaaatggccccggcctggaatttcatggaacctacataggacaggcagggagctctggtgtgaccacacatctggagctgtgtgctttcaaagacaaagaatgcagaggcaggatcctggttaatcctcacagctgccccttttgcaaacgcggtaaacaaggcacaggacagtgatgtcccctgcctgagatcacacagtaatttgaagagctgggacccagagctggctctgatgccagagcctgtgctaactgctgtgcagtttgcttctcttttgatcataggatagggaacaaggacactgcctttccgggagcattcactgaaagtctccctgagatctggagccagaaggtgcaggttcaagtgtcgctcagctggagccctcgggcaaaccacttaatcctcgcatgcctccgtgcctgcatccgtaagacacagtgaaggcgaagcctccatctcctaggttcatgcctcctccttcctgggcttttgtgggaataaagaggaaaagaaggtgcagaatgggggtggttctgggcaagctgccccccccccccgtgcctcagtttcctcatatgtatcatgattatctttcctgtgggatatttaggacaaccaagggcacagggtctgcaggaaggctgtggtggacagaggtggggcagagcagggtggtgtgacctcctcccatttgtagacgctctgaggtgtagttagtgtggagcaggttgagcgactggctctgccaggggcactctgcttccttgctcctggtcacactgccctcccaggaactggcccctgtctgcccctccatctccacggacaggacttaggaaggcaggcgtgggggtgtggaggtcactgtttgccacttgaggggtgctgcttttcctgggatagggctggggatcccctgatactgctgttctctctaaactccattcttggggctggatgtggtttctgggaaagtagggacacttaccagcctcccagcttgtgggaacagacgaagggctcgggttttgagatctttggggtcaagtgacctcaacacatatagagacagccaccttcatcctggcttggggcaggggacagtgggggagggatgggttgcacaggaggggaaacttggctcctgatctgaataaacaaaacaacttccatttattgagccggtatagtgtgccaggcacggggacaagcagtttgcatcactactttcattgaaagcccataacgtaaagcatcattcatacccctatgcaaaggaggaaactgaggctcatacagggaagtgaagtgttcgaggtcagaggcggaagacgacggagacaggattcaaacaggtctgctgggcctcccaccctaagacagccccgcactcacccagagggaaagagagaggtgccaccctgccccatctctgtccctcttcccccaaggctaactgagacttctctctccagcttgtgatctcagtgagtctcagagagcttcctgaataattgattcttcctgcattctcagggaagtttaaggtaggaaaaagccaccagccctccaacagtcttttgttctccttttcccccacatgggcctctccttcctctctcccacccccacatgctcaccctcccaagtgggcttcctgtggtggagatgccctggcagacaagtgagctggcctgggcagaggcaggcaggtggctgggcgcctttcctctcctgcccagcttccaatggtggcttctccgggtcccaacaaagtgacctcgggcaggttggttaacttccctagaactcagtttcctcatcccttaagtgacagcacccacacttcatagttattgtgaggtataaattatgcatgtaagtattgtcatttttatcattatgtaattatgcacatgtaaatgttgttgttactaagtttctgatctgtgccaggtggttctggtggttcttattttaccttcacaaccaacttcggaggtagataccattgtctttatttcatagaatgagggcgaggccacagagtaagtggtagaactgaatccaattccaaatcctaggtgttctgtgccccaaatgcatctgctctgggcagcatcccagagaccaggagggcctctgctcagccctgtgagccaatgggccagcaggaagctctgatctcctctcccagcctttcaagtgcaagtgggcccatagcctgtgttctctctcctggcaggaggggctgctccacaatgccccttcccaccctggctgtagcttctaggcaggtacactcatgagtatggtgtaatcatcaactttggaggtagacagacctggattctaattaagtttgctttgctgctgtgtgacctcaggcaagttacctcacctctctgagcctcagtttctttaccggtaaaatggagtccctgtggttgctgtgaggttgaaaagacaatccatgtcacgtgctcacgtgatgcctgacacacagtgacttctcaccagacgtttgcaattgtgaagacatgtctatttgtgtgtggcgggagcatgcatgtgtaaatggatattcgtttgtgaatgtgtgtgcccatgtatggatgccagcatgtctgtgacaaaggccagcttgtgtatccaggcctttatgatctataagggtggcaggagagtgtctgcatgtgtgtgagagagcatgagtgaaaaagaccagcttggctgcagaggtccttgcacaggccaccgtcactctcccaggcagtccagtgtccctgaaggtcccaggtcaggctggccctgcctcagtctcccaggccggtctgtgcagacaccagtgaggaggtgcagctcacacctgccagggaacggcctctcctcagggtccttcccaccctgacgagtagggcagggctggttacctactctcctgaagggcccacgttcttccccctcctgttggggctgcccacagcgagccctgccgggggcaggtgcaacaacagtagcccagctcctgccaggaggccccctccgaagagcaaactcagtgccacatgggcccatacagccctgccactctctgagccaggcatttttagcaacagactttcttaccaagaacaaaaaggcggatgttgccaggaaatatacatgaatgtacatgcgcacacggcacggacagcaggcaaacagcctaaaagcaaacgcgcttccttaatcacaaatgtcaggattcgtgtcagatcaggtccctgctctgagagacctagggaagggctggggacagaagaggaagggatgcccccaatgatgtcctaccccagacccggggagggggagccagaggacagtgtgtgtgtgtctgggcttcatgacagctggctgtgtctctccaggatcagtgtttatggaagagggatctgagcagagatccaggagtccagctctgaggagtcaaccctggcatcgagactgggatttctccggcccccgagagcacccccctccctggcctatggtgagattccaatgagttcacaccctgagaattcttcccaactacaggggaggacagttgacgaagatgctgaacatgccaagccctctttttgcaagaccagagaaaggtggtgaagcccttgaggccaacacgaaggtgcaacctccccaggacagtgatcggagccatgggtcctccaaccagagcccagggcccctgcctcccctcccagacagctggctgaagcttctgttggtttgagagccctgagatgagaaatcacttcaggagatgggatgggaagtctggtgcagtggaacgtcacagccttcctagcgtcgggattgttggagggcctcgaggatggccccagagagctgcagggtgcccggggatgtggcttctactaagtagctccatgaagcacagggacagtggctagggctccttgagagctaggctcctgtttgggagggctgggatcctgagatctcctagcagcttcagggacctcctcgtgggaggaggatggtgtgatgtgcctgctggctccggaaccccagcgggggaagagagtgtttggggccattgtggaagactctcaagtcaagacagcactgtgggatgtccagaggaactgcccccgcccaccccaggaggctcaggcttatgtggactaaaccctgacacccaggtttggtgacaaacacctgtccagggaagtcgctggcactttcaccgtgccaccgactcactgtggctcccaaggtaggtatggtcctctccctgtgcctcagtttctacatcataaaagaacgggttcaacagaggtggtcccaagggtcccccctcctgcttgcctgcctactgcccctggagcctcctcaccagcaccacccagacaaaacacaaatggtgggcatggtcgcagtaaagccccagtggggaacgcgatggcgccctaccttttgaagctcaccacgccctttgggattcccgtgggggtgttgaacgccggcaggagcttctctcccagcctgatggcctttattcggaacacctgtaaaggaggggatcaaagggcttttgactccaggctgggtgagggaaggtcaaccccagaactgctgcaggcaggatgaaccccccagggctgcaggtctagagtagggggcagtgctgcagtccaccagcccggttcttccaactgctggccacgtggactttggcaaggtacttctgagcctcagcttttgtccataaaataggataatactggccttcttagagagttgttgggagaaatgaaaattagataattgtggcaaagcatctaccacagtgtcaggactctggtggcaaaggctggatgctgcttattgggatggggcagccactgggaagatgagggagaaagcagtgaggtgcggggggtggggggcacctccaagtccagatgaagacctggcagagacgggccggtctccaaaggtcaatgcctgcccacactgcaggactacgataccacaggcagagggcatgggaacaggtggtgccgttcggacagactgtcaagagcactgaactgggagccaagaccaccctcaggttccagagacccttcctcctgggcgacagtttccctcttcctgcgtaagagcagtggacaggcctgtcccgctttgacatcctgatcctgcccactgttcccatttcacaaatggggaatgaagggagagggtgagtggcttatcctcaaccacccacaggacagcaagggagccacagcgaggtcccaggcctcacggcccctgcctgaggctcagaccccttcaaactgttctgagatgtctgattaattcaaaaggacctgtgaccttctgacccagccgtttcctgcctgggaatttattctgaggaaataaataatcgagaatgttgtaaagacttatttattccagcattgtttagaatagtgggaaaaactggaagtgttctaaatatcaaacaataggaaagtggttagataatggctccatgcaacaaaataccatgcagctattgaaatgatgctgtgggccaggcacggtggctcatgcctgtaatcccagcattttgggaggccgaagcaggtggatcacctgaggtcaggagttcgagaccatcctggccaacatggtgaaaccccgtctctaccaaaaatacaaaaaatagccaggtggaggagcggggacagtgggaggaaacctcgctgcaccttggtttcctcatctgcacaacacaatggtggcacgagcctggctgctgcaggggtctttgtggaaatcaaatgagaggatgtagagaaatgaatgtactttataaactgtgaagtgccgtgccaacctcacgtgtgcagctgtggttatacgagttactcccatgggcactggctctcggtaggactggcctacccagcagggggtctccctctgaagcttcatcttaagcaaagaaaggcctcagcccaggaaaagtgtggggtctccttcacccttcattccacaaacctttgtgggaaattttaagaatggaaagacccacccaacaggcacccactgcatgtgagctcaaggactaagggaagagagaggcctcagtctggtgtggctgagccctggtgacaagcagtgacgccatgccaagctgtgacccaggcccatagcacaaaggccacagggtcaggagtcaggcccaacacaaccctcagacactgtgcgacccggagccagttactgcttctaagtctcagtttcctcatctgcaaatcggtgataacatgcacctgatggggccatccgaggctccagtgagaaagtacacgaggtatgcagcatggcatctggctcagggaggtgctcgggggatagatcaggaaggtgtggccagagggcaggggctgcactgactgacacaggagcctgcctgcctgcccaggggttctggccacgttggcccctccttgagtcttttgagctgtttttcaagtcacaggtgctcctgtccacaccccactatctggtctatgttctggaaagctgggttgctggtgccttctaggaagttgaggcctcaaagcaagttctcagaaccacagatgcccttgaagagagaagggaggaagggaagaaaaatgcagggaagatgcatggaaggagaatgatggaaggatggatggaaggagaaaaagacagaagaaaaggtggatggaaggagaatgatggaaggatggatggaaggagaaaaggacagaagaaaagatggatggaaggagaaggaaggaaggaaggaaggaaagacgaatggaaggaagataagacagaaggaaagataaatggaaggaaggatggaaggaaagatgaacgaagggaaggaaggatggaaggaaagatggatggaaggaaggaaggaaagatggatggaaacgggggagggaagggtggaaagatggatagaaggaaggaagaacggaaggaaagatggatggaaggacagaaggaaagatggacggaagggaggaaagatggatggaagagagggaaggaagaagcaatgtgtctcaacagccaccaactctttcctgaattgctcacccccaaaccgccccgagagccctgagctgtgtcctcccctcttccttcctgcaggccatctccactgaccacggccaagtaggaaggctgggcatatgccctgaagaacacagatgctttttctgctccttctgtcattttcctgttctggagttttcaaatgaaattcaggctccgggtggctcaaagccgagggcttccatctacaattatttggggacaaattggtacaagcgctaatctctgctgaggagattatgctcgatggagagaggcctggagcaattggagagataaggtgcccgcctgttgcttcgaaacccttgacttcagcccctggcaccttcacagatgaagggaagcggaaatgactttccagacagcagcagtggaggtgaagagggattattctgtggcttgcccgcctcacctccatggctccttgggtggcggggggcaggcatcattatttgtctctgggtggtcagagcaggggggcgtccagcctcacagcagcctctctgagtaatggggaacagaactgaccaatgactgatgttttggggactcagccaacctcgccaccagatatctgggctgtgcttttaccggagctcgggagcggggatgaagaagcctcccatttctaagagctctgtggttttcaaaattctctcgcagggaggagaagatgggctttggagccatcagccttggggccccaccctttccttcctatcccatgtcctaagaggtctttgagcgaaggggtatcagaaccatccatgctggggaaggaagcgaggcccagggtgggacaaggagctcgctaaggccatgagtaggtgagggtggtgtggagtgagggccaggtttcctgaccgcaccagctctgccttcctgtagcgtgcacttcccagccctccttgtggaaaccaacacagctcacctgggggcaaggcctggcactggcagatacagcagtggctgccccacctcacctgctgcccccgtgagacctggagcaggtgtctggctggtggttggcccaggaggggagggcaaggggtggctgtggaggacaaggcctgggggtcttggtcttggctttatcagtcctaagaaccaacacttgtgaaaagcagcccaggtgcctgctggatgctgagtgggatctgagtggatgatgtatggacccagctgctgctctcagagaacatacaagcacctgtgggagccagttgggctcacctgggcagcagaatggagggatcagagagtaaaggaggaagagccattctcctcttgctgccgctgctttgtgtgatagattcagccctggggggccgtctggggtgggagcaacatgcccatgatgagcaatgactgattaaacagggagcggagggatggtcggagggaaaacaggccctcaggggtggacttgggtggccccaggcccatccctgcccccttaagtcccttttcccatggatggcatgagggggaaggactggatattctccaaagccctttccagcctggacagttcaggggtcatgaaaggccaacccacctcttctcctgtcaggtagaaggctgagaggagtcccccgatgtagcggatgttcacctcaaacaaggatgcttctccgctctgcaggacagaaagaaggagggggacagtggggacacttgtaagatgcaggcccttgagacaggtcaccctggccactgatattcctcccatacctgtccccggctctggtaagccaggcaaggtgacgatggttttcataacaaaagtcaagaggaatctgcacctgcctggcagaactcctgcaatttctagcattccaaataaatgctgggcttggcttccttccccagcccttgctgagatgatggcagcaaagcgatgcctggttgtgctccaaggagcgccagaacctgccgggagagctgctggctggagcttagactgaggggaggtaaatcccactctggccaggctacttcaccttcttggaggagaccccaaggctcagcaggaagacagcaaggccctttcctggttctctgaggaggctgtggggcagacagggaaaggctggggctaagaaggagggagccaggcagccaggcagctacgtattcagtgaacagcagtttcttgggccctcagctcggagcgcacagggcatgcccacacttgccttaatcatttctattttctttcttaagttgggattgcaaatcaggggtgctggagcatcatgccaggaccagatctggggtaaaccccacctgagccactgacctggctttggcacctcagaaaagatgtgcagcctttccctgccccatttcctcagctgcagaagggggctgccaacccctcccgtgcagggtgaacacaggacacaggggagctgcagagagaggcctgcccacagccagacatgcctgttgtcaccctccttgccccagagggttccctcagcatgctttgcacaccatcgtctttattactgagaacagcagtgctcatctgttaacctgggggagctcttcatccacagagcacctgcaaaaccgctccccttcagcttcccagggctcggtgaggtcagtgtggcgagggtcatcattcccatttctcagatgagaaagtcaaggttcgaggtcgagtgaccccaccttgctttcttccagggacatttcctcacctgccccacctgcctgagtgtcccccagctcctaaggcactgtgggcagctgcctgagcccgttctgtatcccaaagagccactgtctacacagggaacgaggcaggcctatggggacactccttccttctccttcctccacctttctccaacccaaagaggggtaatggggggattctcagcttccttggcctcacacaaacaaccagaaatgtcaacaagcctcaaaatcatcctaacaatgacaagggtgacctcactttacatcagtatcagacttcatagtgttataaaatgcggttacaactctccactgtatttaatcctcatgataagcctatgagttaggcattattaatattgttgctgttgtcatcattctcattgtatagttgaggaatctaaggctcagggagggtcaatgacttttccaagagacgcagggcagccaggactccagaggtctctgtctccagggaagctcccctaaagtgttgcgttcccaggctctcccagactctctctccaccctgctctgtgctggcaagctgtctctcaaggaggcagggtcctcgctgctgccaggagctgcaggaaccagccccagacctgtctgcagcaggacctggcactcccggagcccacatggagcctggtgtgtgcttggatgcggcccctcccggtctccactgcttactccccaagtctatgtaaatagcctctctccgtggggagctcccctctgggatgcatgccttgctttagtctgggctgagagatcaacatggtgggctgtggtgttcaaggctgttgtgccatccagacacacgaccattccctctgaaaggctctggtccctgaccaagtgtgcctgcaaggctggagaccaagaggtcccaggcctggccatgggtctgcaaagggatatgcaccacccactccacgcccaccccacccggccatctcaacaggccagtgcagggcgggctcaaggctggagcagctctcagcagatgagccacgtcccccctccacaaagccattccccacttgctgcagctgctgtgtgtgatagatccagccccaggggccgtccagggtggaagcaatgtgccccagatgagcaatgactgaccttgcagggaggggatggatggtcgtggctgtgtcccctccccagggaagatgctagactggggaggatgtccccacctcaaggctgtcttaaggaagggactcagcacagactgcacggcagctccggttccgagactgctgggctgtgcagccgtgggagagaccctcaacatctctgggtctcagagatgacagggtgaagctggctgttgggcctcttctggcccccgcccccctcccccgccgagggcctctgactcaccacgttcaggtggaagctctctcccacccaggccttggcctcctggaactcctccttcagctccatgaggtagagggtatcgagggagtcaatgactgttgccccgctgaggcctcctgcaggcacagagcattgagggtgtgacccagggccatctttctcttttccccaactggacaagccaccgttctcagggcccctccaatgccagcgcaggcttggtggcaaaggctggcctcaggcaccatccgggggactccagtgccaccatcgaaggtgacgccgagacccagagtccccgccatgggctgcttcctcctcaaggcagcaaacagcggccagagagaccgagggcccaggctgagccacttcccagactcggtccactcttctgttggtcagcgggtcaactatcagtgccaatcagccacccacttttctctgctttggcatataaaaatctttgtttgtttgtttttgagacagggtcttactctgtcacccagtctggagtgcaatggtgcgatctcggctcactccaacctctgcctcccaggttcaagcgattctcccacctcagcctcccaagtagctgggaccacaggtgtccaccaccacgcccagataatttttgtatttttagtagagatggggtttcaccatgttggccaggctggtcttgaactcctggcctcaagtgatccacccacttcggcctcccaaagtgctggattacaggcgtgagccgtgagccacctcatccagcctggcatacaaaaatcttttttttttggagacagaatcttgttctgtcgctcagactggagtataatggtgctatctcagctcactgagaccttcatctcctgggttcaagcgattctcgtgcctcagcctcccaagtagctgggattacagatgcatgctaccacactcagctaatttttgtatttttagtagagagtgggtttcaccatgttggccaaggctggtctcgaatgcctggcctcaagtgatctgcctgctttggtctcccaaagtgctggaattacaggcgtgagccactgcacctggcccaaaaatcaaccgtgccaatcctctgtctcttcaagattagttgtagctaatagagggtgaactatggctcaaatataaaataggataccatgcagtcatccacgcaggtgaggtcgacctgtgcctatttacctggggagacatccacgggatctttttctttctttctttctttctttttaagtaaattgcaaataagaaaaaaacacagtataattcttattgtacatcaaagtgtaagtgtacagaactaagtctggtatgacccactgactacctctgagtgccgggattacaggtgccttttgatttcttcagctcatgggttactttcttataaccagaaacttatttccattaaaaaaaaaaaaggaaagaaaatttgggcaaagaaaccaaacaaatacacaaagtaaaaatttgcggccattctcattctagtgcacgaaccagctacgaggcctggcccctaccactgggcatcaggcacctgtcctgggagtaaaggctgagataagtgcaaaatgatagttttccatcccatgaaccagacagaagagtaatgaggaagacaccctctggcacaaccagagccttttgcactcagtgcagaaaactgtgaaggtggaggggagggagaaagggacatgcctgctactatctgaaaggcttcctgaaagaggtggcgcctcccatcaactccttacaactatggagtcattgcaggcagcagtagtttcctttagggaccagagtgtaaccctaagaggagtaattgttccttcagtgtcctccctgcagaggctgaaaacattgagagtcacaggctccaccttccgcagtggaaactctggagcctgttgagcccacttgagtctgcagcgtgggctttgcggcacctcctgaattcagagttagcctctaatctccttaatgagtgcttcctaactgctcacttgtgttgactgaaggcagagaatccttctgaaattcacacacttaaccacctctctaggctgggcaaggtctgaaaaaggatacagcctggaaaaagaatggaagtgagggtgagagggagggagaagttaggaggaagatgaggctggaggtcaaagaatctattaccagaagggagggcccgccaaggagggagcagagggctggaggcacccagccctgtgtcctgggatgggctggaggtcggagaatctattaccagaagggagttcgccaaggagggaggagaaggctggaaggacccagcactgcgtcctgggatggcttccctgtttgggctgaagtgaatttccagaatgtcagcccctcccatgcttaagaagtggtaggaaaacacatcccaaagccaaacagacttgatcctttgccggttcatcccagctgcttcccctgtaggtggcagggctgaacagagttcctggcccgtattcaccctctcgaggtgctcaagcagggaggcactgaggagcccaggcagactgagcaaagcagatcgtgcccagcacacagggtacaggcctggtgtccatgctcctggctgtagctcaggccccttcctgttctatcacaggacctcaaaccagacgtttgaagggcctggaagaatctgggggatcctgctgcccctaccccttcattgtcatagatgaagacctcagagaggggatgggacacactcaagattagaccaaggggggactggcccagccccaggccaagtggaatgtgttttccacgcatcaggcattgcagggccgctcaattctctgtgaaaacagttgcagatctgattgctcaccccaccccacccactctgatcagttacggatcaagagaggcccaggccgtatgtccttcaaggccaggggagaggcagccgcagtgtctgatttctgaatcctgccttgagctccctggtgttttcaccccatgcgcccttcttcctctagatcaggctgggagggcagccaggactcctcgtgaccagctctgccccgtgacgtccctggggacgctctatgaggccagctgagaaagcagcttgctaagagatttgttggcaagttcctgcccctgctctcaggctcctgaatccttctcttggttggtctcccacccccattcccacctggcacatggctgagctgcagtccagcaaggcacttactggaaagcctttcattccagtccagaggctactcagcggtcaggctgggcaggagagaaggccctatcctgaattcaaccctatttgcacctgcagccaccctggggcagctccccaggaggaaagacacactccctgttcagtaaacagaccatgatttatacacaaagagccagcttggacgcttccctagggctgtggctggggcgggctccatgttggtccactttcctgttccagttctgaagccatggggttcaccccttcctgctagtgcagaaggcagtgaggtgtcttagaaataatacaggcccagaaatcagcagccccgcgttcaaatgccgctatgagccagcaacacatctgctctaagcatcaaagttctcatctataaaatgaggttaagaccactggaccagggcactggggagccactgcaggttcctgagccaggataaatacatcacatacacacctggcctagatacatctgataaatacaacctatatgcttggcacagactaagtgcttgataaatcagttcattgaaccgattgttcatcagttctggggtcccttagttcaccttgaaatagcagcctggccagggagtgaggaagggcaacgaggtcagggagaccctcttgatcctttcctttgggagggttcggacctttggctactgaataaagcctttgcaaggcaacctcacacatagctaagaggctggctttggtgtcagggagatgttcaaatcctggcctcttataccctagctgtgcaatagggcaagccattctacctctttgtgcctcgtttccctcatctgcaaaatggcggtgacactaggacctgcctcataaggctcctgggagggttaaatggggtaggttgatggacaagggctggcatgatagtgagtacatgtggccctccttgcccctactggcactgggcagcccctccacaaaaatcttcttgggtcagtgaggccttggggtgcaactacattcccggccctctctctcaccctgcagggcaacgtgagcgtgagattgcagcttgcaaaaacccttggcccaacttaaaggaaaaccgccccacaggtcccatctgtatctgctgccgaggccatcactacctgatctggttgtgtagttgcctccaaaagggtcctcctatctccaagaccccttccctttacctcttattcactctaaagccagatccaacttgggtctctccccaagctcaggaactgccaatggttcctcagtacccatgtaggaaggggtgcaagctcctgcttccataccttggcaagtgtggtcttctctgccaagaaatcttctctgtgcatcttggcatgttcaacactaacatgttcttcaaggtctacctcccaggggcagcctgaactggttccactagctaacctcttcttgccctgagagtgcccacagcactttcttgggcacccaccactacctccctgcactgtggggctttgcctccctaactagactgtgagccccttgaggtcaagggtccccactgcctctctcatacccctccccaccaaccttccagccttgtctccaagcatcccaaaggtcagaaccccccaacccaaatgggccacttgccattccctccttacataccgatacttttatgactcttctacagactctgccagaactgccttttcccatcccaccttctcctgtggaaatctagggcccacctctaatggctcattgcccacaaagccatgcatgcaatctcaccctctgatgtccggcttagagcccttcttctgtgagagggtcttccccagccccaatgtccacattctaggcccctacactgtgcacctccacctccccccattctcatctcatgctaatggactcatgcgtttccctgtccctgtcactttataatagtggggactgtagtctgcatctgtgtcctccccacagtgggacggcaggagggcaggagccaggctggtctccgggtgtcacggatcctggctccttactggatcttggccttcaggctgccattcttcctcttgcttctccttctaccctgggatggcttcttcccagtctcctgtgctggttcctccccatctccagacctctaaagactggggtgccctggggctctgcctttgggcttcctttctgtcctccctcattctcttagtgatttcaaatcttaaaatccatcggccaggcacagtggctcacgcctgtaatcccagcactctgggaggctgaggcaggcggatcatgaggtcaggagtttgagaccagcctggccaacatagtgaaaccctgtctctactaaaagtcacatatccaactctgcatgcatgtctccacttgaaggtctttgggcatcgcatgtttcactgtctgaaagccaatcccatgccttcctccagacctgttccttccagtcttccccatcttgattaacaccaatgtcctcctcccaagagctgtggcccccaacccttgaccctgtctcacaccccctcatccagtcctgcagcaaatcctgctggccgtctctgcgagatttccagacactgcccacatctcaccttctccgtgctactgccctgacccagctacctcctctctcttgcatttattccactggcttcctccccgcccccttggcatctacccttgcccttccctcttccccgatccacccatctgtcctcagcgttgcagccagagagattttttaaaaaattcaagtcagccgggcgcggtggctcacgcctgtaatcccagcactttgggaggccaaggcgggtggatcacgaggtcaggagatcgagaccatcctggctaacacagtgaaaccccgtctctactaaaaatacaaaaaattagccgggcatggtggcgggcgcctatagtcccagctgcttgggaggctgagacaggagaatggcatgaactcgggaggcggagcttgcagtgagccgagatagcgccactgcacttcaacctgggtgacagagcgagactccgtcacaacaacaacgacaacaacaacaacaacaacaacaaaaattcaagtcatatcatgccactcctctgctcgaaaccccccatggctcccatctgactgagagttgaaagccttagtccttcccgtccctggggccctgtgatctgtcctggttccctcactgcctctcctcctccactttggctgcacgctgtcccttcagcctccacttcggcctccaaacctgctccttgcctaggccctggtagctgcgggctactctgctgaaactgttcatgccactcactgtctccttgtcttctctggttttccccagccttcatcaccaggggcatcacgcacggatctgctttcccagccactctgtcttctcctgaggggttggctcctagggagagaactcggttcaccgccaccttccactgcccagaacactttccagcccccacgggggcccgtaagtatttaggaatgaaagaaaggccccctccaactggatggggagggcttcaaggggggctgtggcgcattcacaactcccagtgcctggctacagtctgaccctaggaggcattaaaggtaaggggttcggctgaacaaaacgagcccacagcatgggcgtctgtggtgactacgtccagagcagggttaagtgtctactccaggggctgccaccactagacaaagaccctcccaccaggctgcccagagtgacaacatgtgcccaaagcctcgccctgcacaaagctttctgtgaagagcgtgtcaatctctacaaggaaatgaacctccagctcccagaacctcctccccaggagctgctgagccaggaaccagcctgcctccctggatcacggtctgtatcccaccctgctgactctgccatattaatgatgatgatgtttttatgtgatatcatattagcaaagagaaatggtcaggctggcaacacaaactccaggaagaacatttagaagaaaaaaaatcacccaaggcatagcctattcccacaatatccccagagccacatactaatggctgcatttaatttaatgagacaatgcacagacttttcttaatctgtaaagaaacaacacacacgtttttctcagcatccacagaaacccatgtggctgtgtggcagaccatcttttcaaaggcagctgctgtggtgtatcttatcccacaagaagaacgaagcttttcttgtgacactgacacacctcccatggctcctccccttgaacctgggcagaccattgtgatc

SEQ ID NO: 84 - DNA, 125439 bp, Homo sapiens
  Genbank Accession No. AC010485
aagcttaggggaatgtagacacacatatacacacacatactcagacaggcaaatacttaagacacacaaaaagatccacaccctgatatacacacatacaggtaaacacagacacagatcaatgtgtatacacagatagacacacacacacacactcagacacaaaaatatactcagagaaacacaatcagacacacacggaagaatccaaaagacaaggttaacaggttgaaccctgggtaataaaattcatatagttctcatttttgcctccatgctggttagcattttctacaatgagcatgtattaatcgtgtaaaagtatcaacgaaatcccactgggcctgtgagggtaggcgtgccctggaagcagagtgtaatttcctgatgagctctaaatgtgggctgggagatgagagggccaaagcccctgtcccaggccactggcttctttccgggcatatctcacccaaagatgaggcagcccctccactctgctccctgccaaagggttgggtcaggttctcacctcttgagggtccctcccctcaccgagaactccatgggtcacaattagaaagccaatcctggctgggcgcgctgactcacacctgtaatcccagcactttgggaggccgaggcaggtgaatcacctaaggtcaggagctcgagaccagcctggccaacatggtgaacgctgtctctactaaaaatacaaaaattagccacgtgtggtggtgcgcacctgtaatcccagctacctgggaggctgaggcggaagaatcattgcaatctgggaggtggaggttgcaatgagctgagatcgtgccactgcactccagcctgggcaacagagcaagactctgtctaaaaaaaaaaaaaaaaaagaagccaatcctaaatattaacttgatatccaagttaacagtaaccagaaaaccacggtcctcaaaccacagattggtattttgctgtaatcgtcaagttttaataatgtccctctacttcctgggttttaaaattcacatcttcggatattaatattcctgcattaacaacccccaaattcagaatttcatctttaactgcttgcttaaatggaatcaattcgttaccaattgtcttcaaatatgcagggtgatctaagtaaatgccgaaagataagaaatacacttagcctgaataagtgtatttcttacactgatgtaagaaatgtaaaatactgaccatatacaatggcaggaaacggagcccctgtcactcgctgccccggcccagggctcctgggtacagcttctgtctgtctgggaggcgactgccttgtgccaagaaggcaccctcgttaaggcatggaaacttgatggacaggcatccctcagctcaggccacccagcccctgccaacaatcccccaacagaccatctctccttcatggtcagtctcctgctctcaggaaaacctgccctaacgtctacctccttagatgttttcagagatctaccatgtctgactttgctcccagccttcaggagccaagtgttccagggagcctatcttgccatccgcaggaagaagtctcaagtctcttgctgcagggttcccctccccatctcagcccccactagcccccaaaccaaccccccatcatgcccccgccaggacctggcaatgagcacccgaccccatgcccacacccacccctcctgccagagcccgcagcaaagcctgctcttcccaaatcttccttgggactgctccaatcaagccacacacggaactgctgcctgggccggaccccaaactcacaagcccctacagaccatcccggcctacacccttcacgctactgtcatcacaccgagccacatcactgggtgagcccaggggcctcagtccacagggtctctctggccgtgtgcatgcccaccaccctcagcccacctctgccctgtcccctctgctccttgtcctctgctgtccccacacctcgagaccccacacactcttactgcaggcagcaggcggcctggccctgatctggggaggtggagggaggtctgagaccaaggctgagcccaaatgggacagaccccaggccaggcaccccgagtagccacacctggaggggtcctggcccaaccatccagctggaccagggtcccaagggtataggctgggtggacaggtggggaccactgtctaccacaagctcctcttccctgcaggccaggggataaggggagctgggggggcccatcaggtcaaaccaagaggccaaacctgaacttctgttagaggaggaggtcaatcgaagcccaaggtgcaaggtgctgcagagacatttaaaagggtcaaaaaggacaatgccgggaacaagcagcttcatcagagcagtgagaggcaactggggcggaagcagctgcgtattggagaggaggacgacagcaagattcatcttgcttgggaaacaggctattaatatcccagctagcagctggaggtgcacccggcaggcaggggaatgcggttgctgagcggcagcggctcttggggacgtggtctctgcccagcccggcacaaaagtgctggcagcctgggtgagtggaaggcagggggatgagctgcacctggaccccaggaatgcagacaagactgtccacagggaagcggctgggagcagctggaggcaaaggctggggccccatgtcaaggcccacggcatgcagggtagggggcaccagccagagctcctgcctcagtgaaacagccctggtggcagtgaggtggaaggccccgaggggagagacatgggtggatggccccctgcaggggacaaggaagggagggaggagaacaagcaggccagagatggccacgagggttctcacccgctgcgcattgcaacagccaagtcagagactcggccagcagcccaaggcgtaggtgcggaaactgacgcaccagcacccggggtggggggcagtgtctcagcccagcccccagctgaggggccgggtgagcaccccccagtcagccccagcctggcctggatcagagattggagaggtaccagcccggtgcctggggagatggtgcaaaagtaaggcagtccctggctctccaaaaagtgtcccagtggtgacagggtggggtggggagtttgcagagcacaggctcctctgggctcttggcagaggccacagggactggggggcaacaggtgacagagactgggatgagaggtcacacctaggaatcctcctggggggtagaacgagacctttgcttcctgacactcactgacagtgatgagggccctggggaagcccagggccccacctgccttcctcggggaacctcaaggagcagctggcagagctctgcttcagaggccacatcttgagctcctggctgggaaccacacccaccacacagctgccagacgtggtccaggggggctcagcattctctctagaggaggagcaagcaaagctctcaccgctgagaaggccctcgactcactgacatctgggaaactgggaattggtgatcctggagcccacctggcccaccacgcagatggggagactgaggcacagaggagcaatgggatttgctggggtttgcatgcgggcaactgtcactgagcaccagctctgtgccaggctccaggtgagcatgatctcctccagtgcccaccacaagcccaggcagcaccaggttacacgtggaggagctgagggtccccctgctgcagagacccaaacagaggccatagagaggttccatggcatggtcgaggaaaggtgtgcaggacactggagacccagcaccaggtagtgctggggggattcagggagtcccgggactgggacaggcagcagctggctgtgcccgtagcccctctgagggcctgggggcctggggagagagagcagctccatggccagcatttcaacaagctgggctaattgctgccaggcgtgggaggcggggccgctttggggaaactcccaggaggacacgaagatctgtgcagtgaaaaagcaaacctactacccgcccctccacccgccccactgctcttagcatagggggaggtgggaggtgatacatattcatgagctcataatccctcatcacccctacatcacacacagagattccagcagcttgggctcatacataattataaggcggttcctccatcactgccttggtccaccagaggacaacagaagacatgggggctgtaggggatgcatgataggggaggggctggggatccaggtcccaaagttggggctgggagctgcccactgtccacgtgcagcagcctcgagcgcaggggccttgtctgctatggcatcagccagcaatgcaggccacagacccccagggccagtcaccagccagtccagggacccaagcacatccagtgggcagggctctcccgccctctccaggctctcccgggggctgtgggtgaggggtgacaagcaggggaggggcgtctttccctgtgcccaaggtctgtcctcctgcctggagagaaaaggggaaccgcttcccaagcagggtttggaggctcagcctggcgcttggttaagagtgagaagaggttaaagggatcctgcctgggattaggacagcaggggacacaggggagctgctgagagccgggttggaaggggttaatggctgggactaagagagggggcttgggacaggcacggtgtctcacatctgtaatcccagcagtgtgggaagctgaggtgggtggatgacctgaggtcacgagttcgagacaagcctggccaacatggcaaaaccccatctctactgaaaatacaaaaattagccgggtgtagtggcgggtgcctgtaatcccagctactcaggaggctgaggcaggagaatcacttgaatccgggagatggaggttgcagtgagccaagatcgggccattgcactccagcctgggtgacagagcaagactccatctcaaaaaaaataaaaaaataaaagaaagggggtggtggcttgatgcacagaccacaggggctcacagcagatgtttagagggaaaacaacccacctgtgcctgcccctgcccttgcccctgcccctgccctggccagggctgcctgagcactttccttatggagcaaacagacacggggcacctttccttcaagaaaaatcaaggtgatttttggcaaattatgcttctaaacatttcctcaaaatgcccaaactccttaaaaagaagtttgcatagttcatgtcttatttgtagaccgggaaagacctgctagtgaaggtgggagtgggggatggtggggaaagagtccctgggggcccaggactcacttgctgatgccgtcaaaggaggcctccctgcagacactgccgctgtccgtgttgacgccacgctggggagagagaacacagacatgacacacggggccgcatggcgcccccacagcctgcacccctgaggcctccagctaggctcaggacaggtaagaacaggatcccctcctgccttcccccaacagatgagccacccagccaggtagctccaggcccggccccaacacaaggacagacctctttgctaccacttgccaagtggaggaagtgggggccccccaaactctgcagcatcccagctgcacagcaaggccttctccatggaggtcagagcactctgctgaaaccagccaggctgcccaggcacaggcgaggacccgggaccactcccaatataaatctgctctccccagcctggtccatcttccctctcctgcacacactccccactaactgtataacatccgaaagagtcctgtcgaacccagcccttctggggaggtgtgcaggacctgactgtggcaggactgctgtgaagcagggagacatccctctcttaactccaaggagactccaaatgggacttggacaggaatggagacaaaacaagggacttggagaaaaatgggccctctccagaaaggcaaggcattttatttcatttattttacttatttttttttgagacagtgtcttgctctgtcacccaggctggagtgtggtggcaccatctcggctcacctcagcctccacctcccaagttcaagtgattctcctgcttcagcctctcgagtagctgggattacaggtgcgcaccaccatgcccagctaattttatatttttagtagagacatggttttgccacgttggccaggcttgtctcgaactcttgacctcaagtgatccgcgtacctcggccttccaaagtgctgggattacaggcatgagccactatgcccagcctgggcaaggcattttaaatcaccatttctttacccagaacttcagcttgatgtctaattgtatatctaaattgaacacattggatcatctatgaccataatcatctcacataagtttcccttatagccatcaagacagtaaagcaaaaaaaaggggccaagtgctaaaggaaataactattttggtaaaaatcaattaagaaaagagaaaggctgggcacggtggctcacgcctgtaatcccagcactttgggaggccgaggtgggcagatcacctgaggttgggagtttgagactgatcaacatggcgaaaccccgtctctaacaaaaaacacaatattagctgggtgtggtggtgcatgcctgtaatcccagctactcaggaggctgaggcaggagaattgcttgaacccgggaggtggaggctgcggtgagccaagatcgctccactgcactctagccgggcaacaagagcaaaactccatgtttgaaatgtttgttcttcagtgccataaagaaatagcacttgaacataaatttaatttatttagtaaggccattttcacttcctgcagaaagggtacactctccagcagttttgccacgagagttcaccaaacaaaggagacagggtcgtttataacctggcgtgtccaccctactgctgtgtccggtttccactgcctggaacgggaccccacattctgtatttgtcccgattggctagcaacttagaactttttaaaagaggcaaaggtagagggggagaaaggaaggaggaagtaacttgtggaatgctgagaaaggtaaaaacacttttaaataaggaagaggaacaggctatgaccttatgtttgcttggaccagtataagcacatcagggcaaatatttaggttaaattgtgggagctaaaaacataaagtatattgatttctttattacagctagcagatatttaagaatgttagcacaggtctttgaataaattttgcttctaagagaagttactgtttatttctaattagacggggaggaaagtctttgaagagaaacctctactttactttttatattccatttcaaaaaaaaaaaaaaaaaaagacaagagggaagggtcactttggggggaaggcttgtggacatgcctcttatatgaaactcccaagctcaaagaagtgtaagaaagcacacttctctgagaaattccagagaattctttgggggcacaccacagctcaagtgcccccaaaaccctgccggcgtacccagagcccacctcgcaccccccaccctagcccaggccctcggtcagtcactgcgccccacacccctgctaccttgagggcagacgcccggtggtgtggttttcagacccctttaacaggggagacagagggtgggaataaactttcttttttcctttttaaattttttatttttagttttcatgggtagatattaggtgtatacatttatggggtacctgaaatattctgatacaggtatgcaatgtggaataatcacatcaggatacatgagctatccatcacctcaagcatttatcctttctgttacaatccaattgcactcttctggttatttttaaatgtacaataaattattgttgactgtagtcaccctgttgtgctatcaaataccagatctgatttgttctacctagctatattttggtacccattaaactgactttctacatccacaaattccaggagctcagcctgacacaaatacatcttctagccaggtttaaccttaggagtgggtgtggcgccaggcccacatcctcacgacaggacacagcaggtcccagggagactcaaggatggggtcccataaacagctattcagactgagcaggtatcgctacttatcactgatgaccattcctcttggtttatttttttctttttttgagacagggtcctgtctgtggcccagactggagcacagtggcgcgatcatacctcactgcagcctcaaactcctgggctcaagcacgcctcccacctcagcctcccaagtagctgggaccacaagcacatgccaccaggcctggctaactttttaatttgttgtaaagacagggtcttgccatgttgcccaggctggcctggaactcctggctccaagcgatcctcccaccttgcctctcaaggcacttggataacaggcgtgagcccctggacccaacccctctccgttttttaatcctcccctatgggcccgacctctgcaggagaggtggcccccataaaaaccctccccagagccaagcactgccccacccctggacaccagccacttaccaaagtgaggaggacagagggcttctgtgacgtcaggacgctggcaatctagaaggtcggaaagaaaaacccactttagaggcaccactaagcctaatgaagatgacatgccaccattccttcataatgacagtgcacatttatcaagcagatcattagaacaggcgacgtgggcgctgccctcaccctgcaggtgaagaaacccagcttcccctggttgaaggacttctgaaagccacacagccatcgaggggcagagaggataaacctacacctggctcgcttcccaccgcaccgccctgcttccaggcaccacacagatccctggctccaagcagccagccctacccaccctccaaggccagcccctctgcccatctgcaaagtccctgctcaaagacccgtcccccgggaaccctttaggctccaggcctaccagcctctggttcctagggcagaagactccctccctgctccccattcaacccctagacccaagggagttggccttccccaatcccaccctctggcccccaccccacagcccactctctgtccctccaccatgacccacttggacctcctgccactgcaagccagttacttcccggcccaagcccttgcatctgcatgccgggccagctcctctctccacgcctctgctccagctcttatctctccctgagtgccttcttcccatcttagtgcctcatcaatgtgcactcaggatgaaagccccagccccctgggcaggttcgttcactccctcctctactgccccactgacagtcaccattcccccagcaaagtgccatgtgccaaccagcctgctgggagcaatttcttcctctgccagcccctcctcctcagtctggcctgcatcttggctactgcagaccctcttgtttctgagcaccccctgggcagagaacagtctcatctccacagccctcgcctctccccacacccctatcctaactctttacacccgaaacgcagggggagagtgaggagaacttgttgttgttttaacagcttgattgagtgatcactgacatactctatgctgcctgtatttaacatagacattttgataagttttgacatatgtatacatataccttttttaatactgagatgcctcccaagaaaacctggaacgtattgaaaactataaaaagataaaatgcacgtacaatcctatctccagagacattttagctttgctcataaaaacagagatctgtaatgacatttggatcatatgaaattacatgcttcacttatttcctgtcattatatgttcttcaaacatgcaatttttagcagtcactaccgctggggacagtaaacgtccagtaggtcgctgaagacggcctgtgccagtcatcttacacacagcatctcatttaaccacacggggagacagtgcggcaaacatgcaggtttcgcaaatgagaatggcttacagattagagaacttgcctgagtctggttaaaaaataacagcgcagcccagatttgaacctatggctgtagaatactctcttaatggacactactcattcctctacggacacttaaattacatctaatacactttgggaggacagggcaggcagatcacgaggtcaggagatcgagaccatcctggctaaaacagtgaaaccccatctctattaaaaatacaaaaaaaattagctggatgtggtggcgggtgcctgtagtcccagctactcaggaggctgaggcaggagaatggcatgaacccaggaggcggagcttgcagtgagccaagactgcgccactgcactccagcctgggcaacagagcaagactccgtctcaaaaaaaaaattacatctaataattagcaattataaataacgctgtgatgaacatcctcgcatacaagtatttccttaaaattaaatgccagccagccacagtggatcatgcttgtaatcgcagcacttttggaagctgaggcaggtggatcgcgaggtcaggagttcgagaccagcctggccaaatggtgaaacccccatctctactaaaaattagccgggtgtggtggcacgtgcctgtagtcccagctactcaggaggctgaggcagaagaatcgcttgaacccaggaggcggcagctgcagtgagccgagatcatgccattgcactccagcctattgggtgacagagcgagactctgtctcaaaaaaaaaaaaaaaaattaaatgcctttaaaactgttgggtcaaaagccacagactttgtcaaggtttaccatgctcctggcccaatgatcctccagacatgtatcaacaatctcccgggatcctccctcatgttactgagtgactgcttggagaatggctgtgtcctttggcctcagtgttgcaaaaaaacaaaaggctcagctgggtgtggtggctcatgcctgtaatcccagcactttgggaaggctgaggcgggtggatcacttgaggtcaggagttcaagaccagcctggccaacatgatgaaaccccgtctctattaaaaatacaaaaaaattagccgggcttggtgactgtaatcccagctactcgggaggctgaggtaggagaaccgcttgaacctgggaggcagaggtttcagtgagtcgtgactgcgccactgcaccccagcctggggggcaagaatgcaactcagtatcaaaaacaaaaaacaaaaaaaaacacccaaaaggttcagctgtgtccctacacaccctcagcccctcctgaaggaaggggagacttattaaaaggaacaggggtacacatgccggccctaggtgtgttgttacgttgatgtgaatgttctgcattcagctgcacagaaggagcccgtcaattacagcagctgaatcagaaagccaggaggcacttggggattgtatctgctatcgtcttgggagggaggagcaggataacaaatgtgtgggctgatggtttttctccgggcgacgactctcaggacatgctggttaggaataatggaggaggggagagcagccgtctccttgcagcccggtgctcagacaatccaggcctgactctgagagcaggctgtgcatctcctagtcctggcagggcaacatcttttattgatcacaactgcttgagtgggccctggttacttctgcggctgcaaaaacctctcccgacctggcagctccacccgcccttccccatggagacccattagtgctacgctctcatcagcacaccctgactccgtgcctcaaatattaagggaacacgacgcgctgtgcgttgctggctcccgatgtatccccagcacacaagacagcacggctctgtcaactcagggcctcgtttccacggagtggtggccactggggacctctctcaccctgcgctgttaaatgaccctgccttgcttcatgccagagccagcatcgatttctccggcagcccccggcctctctggcagatggagctggatggtcacgggcagaattcatcagagccctgtgggtgtacatcctcccctggggacaatcattgacttcccacggacacctcctgcactttcctaaccagggcccagaccaggcccgagggccgcttttcgcagggtgataagctggacaaaaaagctggatatgcctttgccagcgctgggaaagcctgcaaggctccagagagctggctctgccctgcaatcactgaagcttttgaaaataaaccttctttcgtggcattctcctccaacagtattgcacgctggtggcctgcactgcttttacaatttcaaatttgtttctcaaatgtaaacatcaggaaacatcaccaacagtctggatgtgtggctactcctgaacaatcaggttcctggagccatgggctcgtggtcccacagcacagtggcccctgctgaccccatcgcttccgatgcctgtccctgtgctgctgcggttgtcctcttacatctgtcctgcctgtagcagacttggtgaccctcggaccttctcacatatgcctggcgccataaagggaagcaagtgcatggaacgcacgcttcacctgccagctctcagccggtgatcccgccagcctttgcacagggccttcacggcagagcctcggggccccactcaaggttctgctgaatgcctccttctcaggggaactgccttctcaataaactcaggatcctctgtggggaggagggaacctcggagccagctgtgccccatcagacacctgcatggcatacatgctatcacgtgaccagccatggcactggaggccttcctgccttttttcagaggagacaagcgttggctgtgatttgtcactgacagctaaggccaccccaagtgagatggggctgagcactgcagaaccagcctggggaccccttccctgcataaagggcttcctgtaacctcccatgatgcaacaggccctgggtacctcaagcaacctgggatacctcccagctcagggggttcagtccagcaagtcacactttttggcaggctcccttcagagccacagaaaatcaaaggcacagggagtccatgtcgcctccacaggagtgtcctacagcagccctcctttctgaggggaaagggaggcctggaggggaggcccctggcgtcacatcccagtaccactcccctccagctgtgggactgtggacgaggcctttctctctgagcctcagcctcatatctatgaacggggtgggggctacggcccagcacagtccctgccccgctgtgtccctcccgcagcgggagggccaaggggctccaagagagctctagtgttactggagcccacgtgggccgccccagcatgaagcgcttgctctgctgtcaacgtgagccttgttcccagtaaaaacagcagcagtaacagtaacatcaacaccaatctgcaatggcagtggcgttgacggggtgcggtggggtgctcccgaaccctaaagagattctagcctttgaactctactgaagcctcgacaatctgctttgtatacgaagacgaagaatgagccagtctctgtgctgtcattctgtgcaaccattaacaacttccctgccctaacactcaaggtggcctgtctcttactttgcttagagaccagttctccttcctcacccccagaaatcacagtagacacggagctgaattttcccccagttataaagacaaaaatgtcagacagtggctggggaggctgtggtccagaggtggctcggactcagcagctgagtccagggcagaggcaggtgccggtcccaccacggtccttgagacagggtcctggaggcaggtgcccatcctgccagggtccttgagacagagtcctggaggcaggtgcccattccaccaggatccttgagacagggtcctggagacaggtgcccatcccgccacagtccttgagacagggtcctggaggcaggtgcccatcccaccagggtcctcgagacagggtcctggaggcaggtgcccatgccgccagagtccttgagacaggatcctggagtcaggtgcccgttccaccaggatccctgagacagggtcctggaggcaggtgcccatcccgccagggtccttgagacagggcccaccccaggctgcccctccaggtttcacatcgaagagacctgaagggtcaaggtttcaaaggacaacagtgttaagaaacagtttctggggcagggaacacatctgccaaggagagggtcggaaggaaaacgagaatgaaggagtaggtgcctcctgctccacttctgagacatacaaggcaagtggcagatggtctcattgggagcatgcaaataaacgttccgtctattttagatcctgtactcaacgggatcaatatgataggtcacatgtgtattgacagaatcttcagatgttaagagtcacccccaaaagcttgggattgaaataacataacataaagatccatcaaaagcctcctctctccacagtccaaccaggcagaagatgctgtagagacaggcccccgtggccctgtagaggtgggcagtgcccttcacagaggctcttccagggatctctgcccaggcaccaccaccctgcggtgactgttcactcatgtggtcacctcctgcactggactgtgccctgggctgttgaggtcagccctgggtctcggccacctctgatgccctacatgtccctgggactgggcagggaaagagtgcaagaggaatgtctggggaaaaagaactggacgttcaagacaaatacaagacagtcaagggcagggtgcacatcagaacacagtcagcgtccatggtgtccacaacttggtcctgagggctcagggaaggggcaccagtgtgggccagagtctacagcagatacagtggctgctacaaggctggtgcaaggcctcaaaagatggataggagaaagacagagaaatggaaaacatattccaggacagcagtaccgggggcagggctgggcacatggtactggcccacctgcagtcaaagagggctggccacccccgagctggatgggccgggctgggcccccacatgctgggcagagacaactggtctctcacagcactgtgtctggccatgatccctgggaacctgcttctcacccagtgccgtcatcttcaaccaggctgtgtcctgcccaggggaagggggaagctgcttggccgccagaactggctcccctggccacttccacactgcagccccggctcttagcatggccgacacataatctctgtctggggaaatgtggctacaggatggccctgtccaaagctgatgctgccaggtccaggttggactcccagtggcaggcattgacttctgggtgcttcacattctacacggcactgacctgcacaggacgtggggttgtgacagcgcccagggccagagcacagaggcctcctgtgtgccaggcagtggtttagtgtcagggcctttggtcaagtagaccacaggggctcccagctgtgctctcgcctctgtcccagccctgccccactggcaggaaggagagctggagtcgaggagtcagggcagcccctttgacctgcctgaacttggttggcacagattcaaaaccccaagaggacagccacatgcctacccaggccacacgacacctgctggacaaccccactgagaagtggattgaagtcaggggacctccaatgctactctacaagcctttcacagcctcgggcttttctgacagtggcatctgcagtcaaccagggctcgagacacacgaagaccccggcccagccttgtggtgacttagaccgtgtgccaccgctgcaggcaggcccgcctctcagagacacctcatgtaatctcagcggccacaacccaggtcaccagacacttctacccacagagtcaggggccttcccaggcaaagcaatggctccgtagagaagcctgaggcatgggttgctgcctactccttccaaatgggagcacctgcggcgcagggactggtggccaggtggtagtgtccctgacatccagcaaggttgtggcagtggaaggagaggaactccaggagtggaaggcatgctggaagccctgggctgctcagaggaggagccggctacccacctcatctacgtactggacgtcgtccacggcatacttctccttgaagtgctccttggaatggatcctcaaagaaaagcacaaggaatatcagggtcagggcttggtaatggctcagcatggccaccttcctgcctgccaagcccaggccatggagccccagtcccatccctatcacggtcagcacccagcacccagcacccggcaccgaacaggtcggcccaacacacacttggagggcaaaggccattaggccatggagtgacggctgaaccacagctgctttcctcagcaagccccgctcctccgtgaccctagccacctgcagccagcccctgcagacaaaacccctatcatcccctccactgccagagacagtccaccagggcagccagccagtgcacccgtccctctgtggcataaaacaatctgcctgccaggtcttcatggagcatctttaaaggaaagtttattttaaggtcagccgcagaatcccagcactttgggaggccaaggcagacagatcacaaggtcaggagatccagaccatcctggctaacacggtgaaaccccatctctactaaaaatacaaaaaattagggcgcggtggcgggtgcctgtactcccacctactcgggaggctgaggcaggagagtcacttgaacccaggaggcggaggttgcagggagtcaagatggtgccactgcactccagcctgagtgacagagcgagactccatctcaaataataataattattattattactattttattttatgttctagagacagcatctcgttctgtcacccaggctggagtgctgtggcacaatcatagctcactgcagcctcaaactcctggtctcaagcaatcttcctgcctcagcctcccgaagtgctgggattataggcattaggcactgtgcccagccaaaaattagcatttttagaaagtcagtatcagtattactcaatgtgatgagaaaaactcaagcttattcattacccctgaaaaatctgccagtgagaagacacagaatggatgaggttgggcagccctcgtccacctcctgatgggccctttggtcacagctgtgctaggcagacctccagcctgggtccagcaagccaccacccccaggctcttggtcaggagataagtcaatgtctctgttagtgacagagcttacgcaaggggaaaggaacacaaactgcacaggggagacactgagagccaagtccaatgacgcacacatactcggtcctatgtcatcccacacctgggccccacctcatcacacgggctctatccccagccgtgctccagccctccagctgtctgtgacctcacagtgttacagtcaccaggtgctgggtcccaaataggcctcagacaaaaaaacagcagatggtttctggatggtgtttcctgggctgtcaaggggtggtggtgaggcaggagaatagggtcgggaggcgttagggctttttcatgctgacttcctagaactaaattgaaaggaaaaccctaactttccacacctaagtaacaaaggaccagaggctgctccctttgcaaacccccccttttttttgaggcagatgggaaattgaaagtacctctgattgcaagtagagtcttggtttgcaaagaaacgcaactttgtaacttcactttagcctctgattggttgcagaagtgaagttacaaaggttgctttccacaaccaatcagactgatggcaggccaccacttcatttacaccaggcgagcaccaagtggccaatgggaaacctcctgggggtatctggacctgagaagattctgtcactaggccttgagactctgctcagccggctcccacactgtggagtgcactttcattttcaataaatctctgctttcattctttcgttgcttcattctttcctttgtgtgttttgtccaattctttgttcaaaatggcaacaacctggacaacttgcagtcaagaccctctacggataactggggggcgggggggggtgttgtgggtgccaaggataatgtgcctggagaaccccacggaacacggtggagggagagaaccttgggacttggaggtgatgaacttcacgagtgagctcctgaactggtgtcctatgtgccattctcagcctttgtgacactaaggaccagcatcacctgcaggaaacagaatctgctcctctctctgagtcctccaccacttccctccccacccaaaccaggaagtactggccacagggcccagggacggctgcagggagcaacaacaaggagcactgagggcccgggagacgctggtctcaccgtaatcaatggactgctcagtgcagcccacaatgccctttgctttctctcccttttggcttctctgaaatgatcacggggtatcaagctcctgctgttaattaaatttgcatgattcagtcacattcacttgtgcatttgagacaggactcaaaagttaaatggccaaggtctgacacctccattagcacggcctcgagcagttatggggcacgaattgatgacgagcgcctcgcctggacttcggaggccccagacgcagggcttattgtgcagctggctcaagggaagcctacagaccctttgctactgagcaaccacactctcagcaccgagttgaccccacagcccggcacaaaagcaggtgtcagaaatacaaaaggcagggccatcagcgaaatgcgtggctgggatcaacacatcaactcggactttctggctccataacaaacaccctgcgtccctcagttgttcccagctctgcctctagccccctcccttcattgcctccagctgtgacaggagtggaaggcaacctcacggcagagtggggaagtacaaaggatctgattttgaggccagcgccctacagaggggcatctcagccatcagtgtggcacctgaccttgtcacttccactcccgttatgggcctgaaacctcccaactcaccccaactgtgcggagggaagccaccaggaaatgcattcccgcccctcctgccaaaaagcgcctcccaagccagaggtctggttctcaacagaagagccattcgacagatacaacctgaaaagctgcaagcagcttttctggcaactgtgcattgcattctcttttaaagggcagagataattaagtttagatagtacttatttttcatgtttgggggctaattatagtaaaaaccatttaaacgtcatcctaagggatatgcgtgccagactcccacgtcaaaccagccaccgaaggcttggcagccatgatttggtggggttgatgagaaaagaagaggtgtggccacacaagccctgcaaagctggctggagaggcccctgaggggctctggactccctgaggccaggctggccagggcaggaggcagccactcagagggagggcctgcaccctgccctgtggggagtctggggtccagcaacggtacttcatgtcaggccccatcgcatgggaagtctggatggaaacaaccagactggaggccgggcaccgtggctcacgcctgtaatcccagcactttggaaggccaaggtgggcagatcacctgaggtcaggagttcaagaccagcctggccaacatggtaaaaccctatctctactaaaaatacaaaaaaattagctgggtgtggtggctgtaatcccagctactcaggaggctgaggcaagagaatcgcttgagctagggaggtggaggttgcagtgagccgagatcgtgccattgtactccagcctgggtgatgagatcaaaactctgtctcaaaaaaaaaaaagaaaaagaaattactggactggggaggatgggtcagcagagaagctgctgtcaccccacacacactcccctcaaatgccaaggatagctttgggaggagagaggagaagtcctcctacctaaaggggctctcgtcctccacaggggtcagcatccagggaccccagttgggccctggcatggatgagagaggcctttcccagtccccggagtcaaagcccatgactgcacactctgcagtgactgccagcaactgtgggggccacgggtgggaaggagacattaaattaatgccacacagtgcagacacgaggagccctctagaaaatgaaatttcaaaaagcaggtcttgctggctggctgaccacctgcatgcgattaatgaataagtaacagggccaaattacagccatcaccatccatttcccgcggcccggcctgccttcagctacaaacaatgctgcctcgccgactctcactctgctctccacagaaggcagcggcatttgctctgcggtggaagccggcagccatctgaggatgttagctggtcagagacaaaagcagacctcgccacagtgacgcaggtgcctatgcccaaagaccactcccggagcaagcttcctcgcaggggccacagagggaacagcgctgcccgggaggctggagaccaggtccagtgaccaggcctgcccagggtcagtgcctcaaaccacccgggcagcagccgaaggagctcctcagccccttctcagaggcctgcacggcaaagagggcccccggcaccctgccaatcacaaggagcgtgggagggaggcaccagagaggctggggaagcctcgatcctggggacacttagtggggcagagctgggaaaaacacacaacacacaacacacaacacaccctcatcacaaacaccctacacaacacacacacctgcacacaacacggcacactcacacccaccacaccccatcacaaacaccctacacattatttactcacacacccacacacccacatacaccctcatcacaaacaccctacacactacacacacccacacacaacacagcatactcacacccaccacaccccatcacaaacaccctacacactacttacacacccacacataccctcatcacaaacaccctacacactacacacacacccaatacaccacactcacacccacaccccatcacaaacaccttacacatcactcacacaccctcatcataccctacacactacacacacaacacagcacactcccacccaccacacccccatcgcaaacaccttacacacccctcagacacccacacacaccctcattacaccctacacacacatccacacacaacacagcacattcacacccaccacaccctacacaacactcacacacccacacactctcatcacaaacaccctacacactacacacacacccacacacaagacagcacactcacacccactacaccccatcacaaaaaccctacacactactcacacacccactctcatcacaccctacacactacacacacacccacacacaacacaggacactcacacccaccacaccccatcacaaacaccttacacaccactcacacacacaccctcatcacaccctacacactacacacacccacacacaacacactcacacccaccacaccccatcacaaacaccctacacaacacacacccacacacacccatacacaccctcacatgcaccctacacaccacacacacagcacacacacacttccatcacaacctacacaccacacacactcccatcacaaacaccctacacaccacacatgcccactcacaacacagcacacacatgcccacacacactccctcacatgcaccctacacacctcacacacccacacacaacacagcacacacacactcccatcacaacctacataccacacaccacacacacacccatcacaaaaaacctacacaccacacacacaccccatcacaaacaccctacacaccacacacacaaaacacagcacacgcacacccacattcacccctcctcataaacaccctacacaccacacacccccatcacaaacaccctacacaccacaaacacagcacatgccccccccacacaacatactctacatgcatcacacacccccaacatatgtcctctccacatcacatccatacgtacccacccctccacatgcaccacaccacacacaggtgtgcactccatatgcacacacagccccccacacatacaccatgcatgtgcaaaccctcccaccatacccgcatccatctctcacacaagatgtgggtatggccctgggaaggctgagcgcccctccctgcatacccagagccggggacggaatgcgttacaaaggttccaggagggtcccccgacctggtcaaactggctccccaactctgggctccgaagctgcctggggcgctgactcacagaggcccacagccaaagccaccctccactaagcccaactccgatgaaaaatgatgggaaatgctctcacatcaaaaagacaccacacactattgttagcagagactctgaataaaaatgcattcagagctaccaccctccccatcccagaacaggcctggggtgaggagtgggccggcttcaggctgcccacggcccctggcgtctgcaaccctgacaacagcaagaccgtttccacaggaagcggcagatcctgcagacgggggtgtcgtttccctgggcgactttggattgcagtatctgccagatggattttcaaaaaccatcagatagggactcaaaaggaagctgaggagctgaaggtcaaatgtgaagtctggtgggttttgcttgcaaaggccaggtactcccgtcagcctcgctcctggtgccctattgattccaggagcggctggaagcagccatacgcaatcagatctggccactccccagctccagtcccacatagtcaaccccgccaccactgctctgttacaactgagccttctctcctgagggctcaggatgtggagactcagacagggtcactccaggacagtggaacggagaggcctgctcggggtggctgtggtagggagccaggacagcaggacacaaggctctacctctcagctatggggccagatgccccctcgggaccaaggctgcctgatctgacctgcccagcatgtacacagccttttccaacaggggagacccctgttggaaacccctggaaaccccaggtggggccctgtttagcccctgatcagaccctccctgaagctgtttctccttctctgtccatccccacatctcacagaggaggcatccgacctgactgctgagctacttctctgagcagtgggacatgtcaacaggctctgagccagcagtgagggccatgaggaggcgagagggcagccaggtcaaaactgcaggtgtcacccggagccaagggtaccctggcacaggggccctcgctcgtcctgagtcgtgccccttgcaagaaaggctgaggccacaactctgctctgggtagagaggggatgctgggagaatcctcctgcagaaagcagacctaaactcttcgtcactgctgtcccagttacaacggctggggaataaacgactccaacacttagtggagtgcaaaaccaccaatcatgttcatggactctgaaggtcgggaatttggaccgagccccgagaggacagcaaagctctgctccacatctaggacctcagcagatggaaggctgggcctcatgcacgctggcggctggtgctgctggcggctggggtccccctatggggagtctgcgcttcctcatgatgtggcggctgggttcccagggcaagtaccccatgggagagaaccaggtggaagccacagtgcagtttacagtctagcctcagacgtcacacagcaacactgccacatccgtcatgaggcccagacctgggacaggcagaagggaaatagatgtcacctgcagacagcgagtgtccagaaacactgctgtggccatttttggacaagacaatctgcctcctggaaccatccctgcctcatgtcagtgtcagagatacagtggccagcactgtaactccagtcctggggggcctccagagcagcatcacagagaaggaactggagccccaaacatgaccagacccacttgcaagccccacggcctctcagaagccacacttagccagcaggcaagctcagcctccaattgcagctccagcaagacctggctgcaggacctgcacaggtcacaccagcacgctgagccatctcctcttttgtaacagggcagtcataaggattccaccgggaatgggataaaggtcgacaataaagatcacgacaggatgggaaggcattgtcaggccagggcctccgaggggcagcccggcagaagccccaaaggcagttggcccgggtgtgtccactccgtgcccttcttcccaggggccgagccaggagaccacccccaggagaaacagtccccttttcttctgctgccaattgtgctccaggctgagtcctgcccagcaaagatcccagtcttgccaggctgggatcctgccaagtggcctaagagcagaatgattaccaacttgtaagcctgaacccctctccctgagacagcaggagcagcacacaccatggccaacgaaggcagaaacggagtctgcactgaagggagggtagcactggaagcaggggaagctccactgtggccccagtcctcagcagagagcccagtccctgtggcagccaggggccttgtcactcaaaccagccacagcctctgcagcccacctggtaatgagcattctggggcaccaggcagcaaaggctgcaatttatacattagcccagaataatcactctccaggcggagatgacacgcagtgaggcagccagcatttagcgggatcctctgatcacctcaaacctccctggttaagtacagtgtccgccctggcaccactgagcaggcagaacagctcctcggcggtggggagtacctggaacagcaggcaccatggagggtggaggagggtgcccagcagcccgagcctctgctctatctcacaggtgagccgggagggcaggacctgcgctgcgtccagaggaaggcagcaaataacacacccagcatatcagcgatgggcctcagagaggcggttccccgatccaaacccaacccaccaccctcaggcacgcacagggccatgccacacctgtcgatgccatgcaggagtgacggcctcgcagggccaaaccctcaggcattttcacagacggagaagctagaatttcaggattaacaaactgcacttctaaacaaacaaggcccccagttgacagggctctgatgagtggaggaacaccagggttcttggtctcgagttgaattagagaaaacgacatggacacacgtggagtggttttaaggagcggagagtttaataggcaagaaggaagggagaagacagaaggaagaagctcctccatatggagacagagggaggggggctccaaagccaaaagaggaggtccccaagtgcagtggacaccagccaagtatatatgcagaggctggaaggggcgatgtctgatttacatagggctcaggggattggtttgaccacgcatgttattcacatagcccactaaaaagctggctctcccaccctagtcttttaatatgcaaatgcagggagccatggatgttctacacatgtggggatatttggggatgttctacacatgtggggcggccatgttgccaggaacatgtgaggcaagggtaagaaggccttgggaattgccatgttgggtggacccagtttctaatggcctgcatttgcatatcaaaggttgccggcctggctctaggagctggggctttaccagaaaacttcccaaggaccccttttcctctctatctacctaaaacaatttctcaataactcctaccacacagtcatactccagctctaacatcccttcccagccaagggtgcagggctctggcgagaggcaggctgtgacagccctgaccgcatgcccttcctcctgcagctcttccctcctccccgtccccaggcccaacccagctctctcatcccacctcccctacccacccccagcccatggttggtagccatggtgccctggccaggctgctccttactttcccatccaggtggcatggctggcaggaagcctgggcacaaacagggtcgacttcccagtgtcaacatcgatgacaccatagcagcctggctcagtgacaccgaacgcccagtgaaagaaggactcctgtggcgggaacaagaactattgttagccagtggaacatgaggtgcaaggagggaccggtggctgcatcacagcaccctagagagccagctcagaccgacagcctcctgtaactgaccccagccccagacatcccttcccctcagcactcgactccccagctcatcctcccgtagtttggcagggggcagcctggcagctcctctaccctgctgggagccctccctgatgctgtgtcaggcatgtgcctgagtccacctgtatccccacccccgggcccacaacagggcgtccagcagcaccacacgtccagctcaaccctgcctctctgccacgtgcaggcaggcaagacgccccccggattctgacgcccaggccggatatctgcacagaaatggattcctccatttaagacttcttacttccctctcccacccccgggacggctgatgacttcagtgtttagggatgaatgctgcgctaaaaggacgtcataaaggtatggtggaggaggatctcttccaaaattagccttgcataccatcagaaagggagccaacagctgaatttaggaaatcggtttttaagccgcagagtatttaaacctggagaagcatcaagactagccagagaaaacttatttagacctccatgtttctcacagccatgggattgcaggcttgcagctgcgcgaacaatggagtggagagacgggacccttcaggcaggaggtgcttttagtaaagaaaaaacacagtctgcggtcgctcagcaatgggtctcagcccatctgtggcctgctggggcgacagggtccagctagggaagccacgccttcccatatcctctccacactcagctccccttcgcattcccatctctcctcttgccaggatgctgcatggacacattccctaggctctgcctgccccagagaggttctgaagttcctgctgtggtcaggctccagctctgggcatggcagcggggagaaaacagcactagatttagagttggaagacaaagttctaatcccagctccacctcttggcaagtcatttcccctctgagcctcagttttctcatctgcaaaatgggtataatgctaagatgtgtgaaagtgggcccagctcagagcctcacagtcttcctgggtgggtgtcctcatgttcctgtgcctggggactgagtgctgccagtgactctcagccatggccaccatggccaggctggtttcctgcagctgggccacccgctgccccacatcttcaagttctacatcttcaaggagcccctggaccacttcccaggcgaggaaacagaggctcagggagggccacaaggggcagcactggccaagctggggcctccaactcctgctcaggacagcagcaccatcacacacctgctcacttgtggccaagcggggaggctcacctggcggaagaggaccccggtgtcggtgcagtagcgctgagtctcctccccgccctgcaggaccacgatggagccggcctgcacagcagggttcttccgcagccgctcacacaggcgctgccggttcaaggcaaagagcgccagcggcaccttcagggtttcattccccagccaaaacgagggtctgcagaggcaagagcacacaccgccacacaggcctctgttagcatctccaagcatgcccacacctgaggtcggggtgaccggaggcccgagcctgccgtgggacccccatcagcacggggcaagctgcccaagctccacctacttatgacccagaaacagcccctcactgatccccctgaggaccacaggggcttgtctcccctccaccacccatgctgtcctgactccacccccctgctcctctgccccccaaccaactgcacagcaggccacagtgaccccacgctcccgaatctgcagcaggtccccagtcctcactggccacttggtgcccatgaccctgggggccactctctctgcggaaaccttctccaacagcagccggtccaggctccctaccaggcaggcccctggctcccggctcaacctccctgctagaggccagcttggcccaaccctggggcctcttccctaactggctccctccctcagctcagctgagcttacccagtccttcagctcaaaggaccatctgcatctgcagactgatgatgtccagctccagactcacagacccatcagccaccctcagcaggcagaagatgcacctgaaccaaagtcgctcctccccagcctcccccgacacaaagcacctgcacctggacagtcccaaaggccatcctggcctcctatctcatcccacctcctggccaccagcaaggtctaccctcattgcacatccccatccccagggccacctccccatgtcccgtctggacaactgcaggcaactctcaacggtgctcttggccgcaacttccccgtggcctggtctgcaccttctgccagaagggccctttcaaaatgccaatcccagcacacactccctgcccaaccccgtgccagctggcttctctgagtgcagacttcactccccagccacaagggatccagacccccagttcacccttggcttcctctactgtggcacgggcatcctcgctcttccctaaacccccagaacactccagcctttgccgctgcggcgccctgtggggaatgctcttcccaagggcatcccatgcccttttacccagcctctgcagaaatgcccctttcctacccaccccagcctctgcagaaatgcccctttcctacccaccccatcccccagctctcttcgtgtctctctagagcccccatcactcttcatttatttgtttgctggccctccaggtaacatgtaagctccctgagggcagggacagagcaggtgtcggtatctatggaatgaatgaaaaaacggatggtggtcccagcaagcaggctggaggccgggtgtggagagataatggggatgaggtggaggaggagtaagcaggggcagggtgtgcaggagggagcccctgcggctctccagccagggggcagtgggtgggcacggaggtcaaggaggcagggacatcccagagctggtgcgagcagagagctctgcctggggactgcagtgaagctgtggatgaaacctgccctcacagcacagcacggtgaagtggtctggggcacctcacactcacctcacatgggaccctcagaggccctgaccctcctgccagggtcacatgagcaggtcacacctcctgcacatcttggctccaatacgaccttttccggatggtcttccccggcctccctctttgaacctgcagctcttctccttgcccaatcccctactagtccctggcctgaggtttccccacttgccctccagatacacccccctgcactgtgcccagaggccaacctacccgacctcctcagcatgcacgctgcctcctgtctccaggcgcactgagccaacgacaggcacatgaggctggggtcaggaggagagggaggaagacagtggatccactcccctggctccctccctggggaccctggaactaaatggctgggggcacccctccatccagggccgctgctctgatgacagcgccctgccccacagcacagcccctgctgggtttctgaccaggttccccactcttctttccactgtcttcctccctctcctcctgcccctagcctcatgtgcctgccttcccttaacgttcgcacagctctgtgtatcgtcccctctctcaactctccttagtggccccctggagtaaactcctaacgtggggccaggtccctggctaacacaacacttagcacacagcaccttccaacctaaacgcagcgggtgctgcctggtgcttcctggtgttctccggcccgccgcctcgggtggaaacactgggagatggagctccaggttgcctcggtcactgccgtgccctcgcctggtgccttgcctgacacacagcaaacgctcaacacatatctgctgaatgacacacggggccacacacacagctgtgggatgagaagatgccacatcagccgcagcagggcaggaagcagccctggagtcccagcctgcccaggaagggtggagggtcagaagcagccgcacatgctgacatgactagagccccgcccgctcccccacgtgcccttcctaccctcccaggagggtgagcaggtggctgggtggacaccagcggccagagcttcctctgggctggggctgcttttctgccacgctcagccattgggatgaaagggcagagggaagtcggtgagagttcgtaaacatgaccacatcccagatggccatgctgtcaggagctaaaagtgcagtcaccagcaccttgtgctcggatatcccccatggcctcccacgccctttcccttcactcaggaaagcccatggtgggatgggcacagaggcaaaactcgtctctgcagaatccccaacagcttaggggcaatgacaccgagaccctgctatggacagcctcagccacagtcgtcgaatagcatgaccggccgaaaatgcccatcctcagccaccagcctgcatagcccagcccagcccacctctcccacactcccctctccctgcctggccacactccttaatcataacaggtgctggctccccatggcctgacaccatgcccccacctgtaatgctcacagaagggctggccttccccttgttcagaaccttctgagagacaaatttctcagggcacccagactgggatcccaagggctgagcagaaaacttgataagccaccttctccttgaacactcagctgccactgcaaagaaaatctacaaccatgcttatttctccatggggctccgccagaacagaacccaccctgtgcagggctctgagcataagaagggctagcctgagccacgaggcaaggcaatatgctacagtcattaattacaggacaccaagtaataaagttttatagagacatgccctttgatttcccatggcataaaccaagcccccagagagactgtcaggctcagagtcaacacagacgaattcttcctgcaaattcggcaaatgtagcaccaacaaaacatctctaacaggtttctgctgcagcttttgttaactggcacccagaatttaaaaggcaaaagccattatcatccccaggtcccagggtaaataagccatgctttgctgcagacagacaaggcacaagagctccagggcctcagagacccacagaacaagtctctgagccccagaggccaggacccccgctgccctggaaacaaccaagacccagtaagcagcccaggaccaagaacggagtgaccaagactgaggccagtcctcaaggagggtatgatgccactgcccccacaagccgtctctgtctccacacaacccacacccccgtatcagtactgggacaccctctcctcaacagccacgtgcagggctcttacctaaggcctagggacccccaaggattcatcctcaaattcaggggctccatctactagatgggaaaaagctgtacctttattttctctaacctccaattcgaatttacattttcttcagttattaacataagcaacaaactactcagtgtcagcaatgcatgttaatctgtcaccaacaaaaatcaaaggtattttaataccatgttattgctcttccagtatctcaaaatatcacttttgctccccacaacttcaaagttaaagtagttgggccaggcgcagtggctcatgcctatcatcccagcactgcgggaggcaggaattcgagaccagaatgggcaacatggcaaaacccccatctctaccgaaaacacaaaaattagtcaggaatggtggcttgtgcatgtggtcccagctacccgggaggctaaggcaggaggaacgcttgagcactggaggcggagactacagtgagctgagatcgcaacactacactccagcctgggggacagggcgagaccctgtctcaaatttatgtaacattttgatacctgtatttccatataattgggttttacttttgtaatattatgtacttatttcatacatttaaaaacattatgccagccaggtgtggtggctcatgcctataatcccaacattttaggaggccgacatgggcagatcacctgaggtcaggagttcgataccacctggccaacatggtgagcccctgtgtctactaaaaatacaaaaattagctgggcatagtggcacacacctataatcccagccactcgggaggctgaggcaggaaaatcacttgaatctgggaggcggaggttgcagtgagccaagatcaagccaccgcactccagcctgggtgaaagagcaagactccgtttcaaaaaaaacaaaaaacaaaaaacaaaaaaaaacctgatgccgagaatggtacgtaggtttcactgatgcccgtggggtctaccgcacagacaaggaaagatctctgcactagaatgtggagccactggccaggtgcggtggctcacgcctgtaataccagcacttggggaggctgaagtgggtgggtcacgaggtcaggagtttgagaccagcctggccaacataatgaaaccccatccctattaaaaatacaaaaaaattagccaggcatggtagtgggcacctgtaatcccagctactcgggaggctgaggcaggagaaccacttgaacccgggaggcggaggttgcagtgagccgagatcgcgccattgcactccagtgtgagactccctctcaaaaaaaaaaaaaaaatgaaatgtggagccacttctagacagggtcacaccgctaagttcccagtaggagaggccagccaaggaccagccacctcctcccctcagcctccagcgtggggccaggcaccagacagatgctcaggcagcccactgggcaccagaccgtaagcgccaggctggagagggttgccacggcggaacaggacctcgaggcaactggccagcaacctccaccttgcacctctgtctcctggggcggataggggtgccaagcatacacagaaaccaagagacagctgtgtggagtcaggacctggggaagagccagggaaggcacagggatactcagtggccagcctgcctcccataggcccacccgtccctagcccccagtcggcctgagtcttctgctcctggagcacaaggttcacattgtggggttgggctcttgacccagaatgtgaattctgcagaagactctccagaagaatgctgactccagtgtaacctacggctcaacaggggtacacgtccagggcagttcacctttgcctctttttggctctgcaacagctcctgggagccactcagttaaagaattaaggctatttcttcatcctacccctcggaattctgtccccattccccaccatgactccttccctcaatcactgggagtctcccaggaaagcaggatgggatgctggactaatttagagtaaatccccttttcattcatttcaccaagcaccaatcacagggcagccacagactggccctgcggatacaaaagaaccccaggggttctaaggatgctaggagaggcatgaagggaagcaactcctaacccacaatgggcagacgtgtaaaagtgtactgctggggagaaaactgagtgttctggagttctgagcactaaacctttacccgagggctgggaaaggcttctgggaaagggaaccatctgagctgggcctgcaaatacgtgaagaatcatatagaggacaagaacattccagggctagttgggtgagtgtgcaagggaagaagggaatggaaaaagccatgtgggagagcagatgcagacaggtctggctggagctgacagatttcaaattatcaatcctgtctgtggaaagctcaaagcattgcttaaggagacagcagcagtgccaccaagtgccatgggatagggacccctctccatgaggggatgggaggtgacctcagcgcactctgtctcaacctgaagcctacacccaggctagcaagagaaagtaggatcaaccctgaaacaccccacatcttaaaaagagagatgcattcagagtagattcttgagtttcaaattaaatctgagatgctagtttagggcttcccctactccccaaatcatatggggcacaccccagtcacctggaactctcatggaccccctctgtcccaggctctggtaggattctacagacaaccaaacccaactcccagtgagcccacggcaatggccgtgacttgctggcatcatgcctcgttatgcctgactctatgatctgttctgtgagtgtggctaggagctgagctttgcgggaaacacacttaatcattctgctctaaaggaagccactggggtcaacctcaggctcaaagtacatgggaaagccccataccagactgggatggctcttcccaaggagactgccaggctctggaagctcccacaccctctcaatagcagacctctctaagacctgccactctgttttgcctccctcacccaccctgtgtggtggcccagagaatcggttctgctagaaaagctctcattctggggccaggcgtggtggctcacacctgtaatcctagcactttgggaggcggaggcgggtggatcacctgaggtcaggagttcgagaccagtctggccaacatggtgaaaccccatctccactaaaaatacaaaaaattagctgagtgtggtggcacacgcctgtaattccagctactcaggaggctgaggcagaagactcgcttgaacctgggaggtggaggttgcagtgagccatcatgccattgcactccagactgggcaacaagagcaaaactacgtctcaaaaaaaaaaaaagaaagagaaaaagaaaagctctcattccaggatccagtcagttccagacttgctcccgtccagacatcagcttggttccttcaggagagcagcaggtctcaggccagcttggaatcctgaacccaaatgcaacccctggcactccctgtgagcaccgagccagcctaaccagagagacagcacacccacagctgggcaccagcctgctcagtctaccctttaaaagggtcacaggctggattcaaggatctgaccctgagttccttgacacccatctgagactttgtctgcactgttctctacctgaagggagtctcattgctgaaggactagcacaaaagtcacccaggaagtgaagccttcccacactttatctgagctcagagtccatgcccctcctttgcaaatggcaagaccacacggcaagcagatggatgacagagtcccatgtgtccatctgttccagtggcctgtgagtaccttaagggaagacccactgctattcctggaatatagcaggtgcccacaaaatatttgatttgtatgctctaagctccctcaaccttgggggccaacttagaacccactttctgttgccattttccctgtatcttaaaaagagagatgcattcagtccactagatcccccattctgacctcagtttccaacctggcatctggaatactgctccctcctacaccatgccccctctaccccactgtaccaccagacccacaccttctcccattgaactcacacatagctcaggggagcctaatctttaaaaaacagatcaagcagcttgtaacaaaacccttccagcccatcagggcaaagtctgaagccgccacctggaacaccacaccttccaaccagccccaggcatgcacccctgtccccagaacactctgaactctcaacctttgtcccttaccctgggctcagatgctccctatctgggagattccgcccaacgctctggtgaacccatctgtccacccttcctcccactacgaccactcagctttctttcatttagcccagtatggagcacctactgtgtgcaaggcaccgggctactgagaagcaggtaacatacctgcccttgcactctaaatgcagagaagataaagaacaagtacaaacaatgctctatatagtttatcaggtgatgatgagggcacaaaaagtgggatagatggttagagaaggattccctgagggggtgacatttggcccctgaaagaaatggggaagtgccctgctgggaaaagggaattccaagtccgtctcgaataccgcctcctccgggaagcgcccgggtccctggggtcctcgcaacgccgccctcctacccgggggtcttggcagcgaacatgcgtgtcgaccccagcccccaccgcagccgcacacggtggggccgccagacgcgggcaggtggggccggagccagccaggagggtggagaggagctgcggcccccgcgctgaccctgactcggagcgtgcagctcgccgaccggcgctgggactccgggccaacgggaagaggcgcctacccgcggcattcagcgaccccggctgacgctctcacccgcggtccggccgggacacccatgcccctctccacgccagcgggaaagagcgagggaggcgcagcactcacccggtggccgccgccatgttcgcccggcaccggcgtcacgtgaagtgcggcgtcagctgagcccctccgggtgccaatgcatggggcggggtaagggcggggcagggggcggggcatggagtccttgacccacctcctccagagccaaattccacgggacgggaaggggcggtacctggggaagggcggagccccgatggggcggggctcccggagattgggggcccaagagctcggccaggataaatgagcgggctgccggctgcagacagtaggtcgggttagcgggcagcatctgcagccttttcgtggtgggagggaggtcctgaagcagaggacatcttgattctggttcagtccccgatctggcgtaccagcccacccgggagaagaacacataggaataaagaaaccacgtgggaggagaggagggagactgacccaggctagggtcggggcagaggtggcgatttttgtttaagaagggaaagggcttgagcaaaggccgtggggcaactggaggactctaaatgtgcagcgtccaggagaatgtgcgcgagagaggggcagcctaagggaagcaagggccagaccctgcggggcctccactgtggggcctatgagttaagtctggtaggatcttttctaggtttcctgggctgcagaatggagaagctggaggaagggaagccagggaggagggcaggcgagaagtgggcacagccgagaagggtttaggagggagagtctgccagaaggcttactcctctgccccactgggcactggtactgggtgcagagtcctgcagagaaggtgtagggaccctgcagcagacgctgccctccctactgccaacagagtcagggcattacaagcacggcccaaatgcgttgcacatgtgagctcatagaaacctcaccacagccctatgaggtcgagactatctttaagtctattatacagatgaggaaactgaggccagagagtgctcacacagaggctgagctcatgaagccataccctgaggagtgacctcactgcccctgtgaaggaagggggccccacactgttgggggagggcgtccctggcgccaagggtgtacagatgtgtgtggtgtacagatgtgtgtggacaggtggatgggtggcccaggataggcgtgtggggctcctgaccccaccctgcagctgtcccacagctggaagtggcttctgatcaaaggttgtgggttgggggatgcttcttgtttctttatcgaaacaaggatgtgggtcaccatggccaggctggtgggagccaggggctatgactggagaagcagcttctgtttgtccccatgaagcagggaggagaataggccccttaaataggagcaagggagccagccataagcagggtagtgaagggcacgtggcacagttacctggaagcccagtaccatccctgctgtcctcatctgtcaggagagagctaatggggccacctcacagggctgctagagggttttacactcaaacctgcaggcacagccagagaccaaagctgccaggaggaatgtggcccctccagacagcccctcccacctcccggtcccagataaggaaaacgagagctaatggaagagggggggcctcatcccttctaccccttcccacaacacatggacaatttgcaggggtccctgacctccaggcaaggtccaagaggagctctctccaccctcttgccagtttccaggaagaagaacagaggtaaggattcacaccccactgcctggcctaggggcccctgagaacttctaacacccctagttaagcagtaggtccgccttcagcttaagaaactcaactccctagtaagtggcgctttaaaaaatacataataacaaagggtgagcagaatgagctttccatgcgccttcaaggaaggaaaacataccccccagctcattcattgcacctgcctcccaccatttcttttgacataaaatatgtcaaaattaagccagctgccagctctgagtgcttactaatatgaaaaagaagtcaatatcccaaacacaaaataatggaaggaaggcacccaccaactgagtggagctcccttgtttgtggacagtaatatggaggcactgcccatgacccctgcccacccaggtcccctgccctctcccctccccatcaggggctccggcagggctgcccctcacccctcacccctccccatcagaggctgtggcaggggctccagaagccgcccagaatatgggagaagaccatttagttacttatgcagggcagacccaggacgttgctggagccaggaggcaattgggggaagattgattttagagagtcgaagtgggagtgtgtaaatcagccaaggcagcgcgccaggcagcactctcatgcggcattgcctccgaggtcacaggcccttgtggccgaaacagtctcctctcgtcaagccctgcaggtggctggtagatgtctgcactcggtcagcctggtagcccggtagccagcatagcattattctccagaagggcccccccaactcccgtcaggccttgcaaaagaagcttcaccctgggaagacacctcttgtgtcccgggacactgtgtccagccaggtttccctcctccacccattccccacaatctagcccccactcttgcaactccgtggacgctgctgacagctggctgcctggagacggcaggcccagatgtggcggcctgctaggctctgactcatgagccacccttgggccatgaaggggaggtccccgggaagagccctgtccatcttctgctgtggattgagggcactggtctaccagaggctctgtgggactgcactggaggtagcctggatgctggttctgccctgcaccacccagttgttgcccacagtgccactccaggactggccatgctgtgagggccagggatccagaccctgcccttgcctagaggatctttggtctggggacagaggtagaggagccctccacactgtccctggggagtccaccatctgggagggcctcagaacggggcttcgagggttctgcttttggctaatggggagatcctgggggattctgagctgcaagctgccgatccaaacccctctctccagcaggagctcaggaggattagcagagagaactgaaaagagccaataagagccaataaagccactgcacggggccgccagcctcagatggtcaaagccctacacaagatggcatttgggtgttttgcgattgtttgcttttgctgagaatagaagactggatgcagaaagccagcaccaaataaacagaagaggaagaatagaggggactgtgggtgtgagataggggcagggtggcatatggcaacccagtgtcttcccaagtgggaaagcaaggagcgtgatgggtgtggaatgcccaggagaccgtctctctatcctggttctggcagatcccagccttgggcctttgcagggcctgcagaggtagccacagctctcccactccaaaggcctgtgtggcctgctccttcctccaggcctacaccccagctgtcaccaccatccatcaacccccctcctcacaggagcccccacatcacgttctactcctcctctcctttctcccccagcccagcccacctgggcatctatcttcctgtagaaaagaggcaggcagagctgaggggccttcccaaggaagcccccatcaccgcctcagatgaagtggtccctgctgaatgctttgctggggtctacgaggcaattcaagatgagaaatggaacggtggcttcggaaaagcaaatcattccaacagcacctgaaaacatcgaaggaaacaagctctttttgtgtgtgtggaaatggggaatatattgtttctcactgtttcgaagactgttttcccatcttgaaatcacaagctgttttcttccagagagacttataaatacatccaattatcgacattcaatataagaaataaagttctgaaatggttttcttcagcacatgcagagtgagccgaccaggttgggcaggtgataattacttttatttcttacgagtgggtatcaccgcggagtggctagaagcttcaccttttattgccttcaccttttattacatttcccacgttgtgcagggctattcattggtaattttattatcccatatcaagatcttgattaaaaaaaaggatgaaatttctaatttcaaaagatatgagtgcaaagtcccagagtaggaggatttggtcctataccttgtgacctgaagagtaaccctccagggggatggactgtccttgtgcccagctccaagtgactgaatgtcactgactagacagtgggtgtctgctggcattcacaattgttcctttttttttttaaatagagatggggccttgctttgtcacccaggctggagtgcagtagtgtgatcatagctcactgcagcctcaaactcctgggctcaagcaatcctcccgcctcagcctcctgagtagctaggactacaggtgtgcccccccaacgcctagttaattatttttaattttgtatgttttgtagagatggggtcttactatgttacccaggcttgtctcaaacttctggcctcaaggcatcctcctgcctcagtctcccaaagctcaggattgcaaggcatgagccactgagcctggcctcaactgttccttttagggactctgctcagggtgtcattttaagaaggatgcttgtcattttaggatggtgtcatttcttttcttttcttttctttttattttttttttttttgagatggagttttgctcttattacccaggctggagtgcgatggtacaatctcggctcaccacaacttctgcctcctgggtttaagcaattctcctgcctcagcctccggagtggctgggattacaagtgcccgcccccacacctggctaattttttgtatttttagtagagacggggttttgccatgttggccaggctggtctcaaactcctgacctcaggtgatccacctgcctcggcctcccaaagtactgggattacaggcgtgagccactgcacctggccaggatggtgtcattttaagaagcatttcatgaaagcacctgccggtccttctgtccatgccaccatcaagatgagatcacctgtgtctcctcccgctccatccactgggattgctcctgaccccacccctgtctgcacttcctcctcaatgtcttgtctctcctccagcctcttccttcccgtggctcttttgctgctcacctgcataactacttggctgcagtcccttctcattctgagccccgactcgtcaagatttttctgtagcaagcagctcctgagtctcacctcaagtagaagagggatacattcaaatgctgtccagttgcacagttgcaggagagacagactcagaaaacaggcagaggcagggaggctggcagctgagtgcaccaccaggctacccccaggacatggcagctggcacagctgctcagacccttgccatcactctgcccttgggcgtaactgggactgatacagtgtcctggcttcaccccctgcatgctcaaagcgcttgatgggcagtacagccagttgcagtgcccaagtctcatgcccacaccttggctatcatgtcccttttggcttctgctgggggtggggatgtgtgtatatggggtgagatgaggtgggggtagatacacaaaacctacccccacaagtaaaaccttgaaaagtttagcttggataaaagcctgaatatttcaatcagaatgtctagaatgcagctattttcgttttagcataagtgtgaatttcttgtttgatggtttggtataatttaaatttttgatttacatgccgggggacaggatacacaattgtctttctttttttgagtgatggggggacagggtctccttctgtcgcccaggctgtagtgcaatgccaccattatagctcaaccttaaactgctgggctcaagcgatccttcagcctcagcctcctgagtagctgggaccacaggcgtgtgccgccatcccagcttatttccagtgtcttggctctggagctcttacctagctctgcctccatgtcattgccaaataaatatccctgagcacaaaatgctcgaatagaaactgtgtgatggagaaagaagtgcatggacttcaaagccagaagcctgggcttgactcctggcagcttgacgtctctggtcctcgctttccccgtttggagatgaagatgggatgggctttacctccctgacagggcagttccaaggggtcagatgaccccttgaacactaaggcccttgggggcagtttaacatgatgcaaatgtggtggtagttactttccttattgatacttactgctctttttttgtttttgagacagggtcttgcactgtcccccaggctgtagtgcagtggcacaatcattgctcactgcagcctcgacctcctgggctcaagcaatcctcccacctcagcctcccaagtagctgggactacaggtgtgcatcaccacccccagctaatgtaaaacatgttttctgtagacatggggtctcacggtgttgcccaggctggtctcaaactcctgggctcaagcaatctttctacctcagcctccaaagtgctgggattacaggcatgagccatcattcctagcagtacttattattagagaacctggacacagtggttaggaattggatgtaggaagctaggtccgattcctggcactgctatttacttgctgtgtggcatagggaaaataacccaacctctctgagcctcagcatcctcattggtaaaatggggacgatgggtcccagctgggaggattgttgagaggattagatgaatgtcacaggagacactcagctcagcccctggctcatgggggtgctatccttatttcagtggtcatgtgaggggtaggggcagtgaggagagacaagcatccttatctcccaggtgtgaaggtgggggagatgacctgtgaggtcactgtagccctgctcagctacagagcgaccttgaccgaaggagtgagtccataaccccaagcccagggggccagtgcttagcccctttgagaggactggctgggacctggggttgccacaccacctcaagcaagcaggctggcagtccagccaaacacagcagtgctaaagggaaagagaggaacaagggtgagcaggaagtcttccagggtaggggagatgcttcctcgctacacccagggcctctggtccagtccggggcttcagccacagggctctgcttgtgcgcatggatttgcatgtaaggaagagatagcctgcaaggaggtttgtaagaggaattagagacatgtaatagattgcagaattgacctcaaattcttctacgtgctgcgtccacaacccgcttttgtgatgttcaacccctcccatctagaggtagaatctatttcaccagcccttgaatgtggcggccacgtgacttactttagaaaatgagaaggaaagcttggaaggtgctcctccaccaggctcaccttcttgccattcttggaagccctgctaccatcaccatgggaagatgccctcgccggagggtgagatacctggtcaacagctaaccagcagacacacaggcgtgggcagccttgattatccagcctgaggccaactgctggcccatgagtgagtccagcagagaccagccaagccagcccccgcatcctgagctctctcagggatcgtcttacccattgcatccagcagcgttttagaccatgattataaccaacacagggtggaaggaggagatcctgggactactgccccagagagaaggctgggggagaccctgcagggcctgtgtgcacaaggagctctgcaaaatgcagggtccaagcagcactgctgtgtggccctggagagagagtgtgaccttcacctccccacccccgcctggggcacagcatggcttctgagcagagaaggctgcagggacccgtaatcccagctacatgggaggctgaggctggagaattgcttgaacccaggaggcggaggttgcagtaagccgagactgcgccattgcactccagcctgggcaacaagagcaaaactccatctcaaaagaaaaagaaaaagaaaaagaaaaagaaaagattaataggtacgactgttgtgcctcgttcagagagtcgcacggtctctgaatgagatgccaagttccctgatgccgtgatgaaatgacaggagtctcactcctttccccattctttctggatattcagttcaaacagcttttgggaaaaatcacaattttatttccagatctcagagattgatatcatactatgcattttagggcttgtggggaaatgaaccgaaatcatcctgcagtggtgaggccggggcaggggctctgcacctgcaggtcctccaaagtgatgccatctcagttcccagacgagcccacctgcaggacccactattgcccagcacgaggtcttcctgagctttcctttccaggtgtggccaggcagctgccctcattgctcagagtctcagtaccagccctgttggggcagcagccaggcctttcttcacagggatctgggagcagaagagacctaaaatctccagcaggtgccatctctgcttgaaaggaagaggaggccaaaactgggctgagaaaagctcatgaaattgttacgaatgttccctgaactccaggctggagaattggctgcacagaaaactgtttttagctttggatgtggcaccaaggacagactttgtcccttctgtcatcagtggatgcttgttatgtgaagactaacggcactttctgagggtctccaaatcctctggggacagtccacaaagcagaacgataagtgccaggctcctttgcgggttagggggataggtgggtgggaatgcagcccgcccccagagatgctgatttgctgggcttgagtgcagctcaggctcctggattttgctgttattgtttagagatggggtctcgctctgtcacacaggctagagtgcagtggcatgatcctagctctctgcagcctccaactcctgggctcaagcactcctcccacctcagcctcccaagtagctgagaacactggcacgtgccaccatgcccagccaaatttttaatttttattttttgtagaaatggggtcttgctatattgcccagggtgcaggctgatctcgaattcctaggctcaagccatcctcctgccttggcctctcaaagcactgggattactggtgtgagccaccttgcccagcccaggcacctggatttttaaccaacactccagctgcctgtggtttgtagccaggtttggagttcgttgtctgggcagccacgtaaggaagcagcctctcttgtgcctggaggtcaggctggccctactggctgcctctcctgagatgaagcttggccactgggcatccatttcccagcctggtttattccctctcttcccccagtgagggcccatcaagccctctgataccgactccttctgccctccccacagctcgggcaggaaagctcactggcctggccaggggactcatgggatctacaggggctccctactcccacccaagcctggcaccaagtacaagcttgctgagatcaaatgttgtagcgttgtgtggagagaaatggaaacagctactttggaaggtgctttggcaatatgtgtaagaaagaaaagaaaaggaaaagaaggaaggggccgggcacggtagctcacgcctgtaattccagcacttcgggaggccaaggcagggggatcacctgaggtcaggagttcgagaccagccttgccaacatggtgaaaccccatctctactaaaaatacaaaaattagccgggcctgatggcacatgcctgtaatccaagctacttgggaggctgaggaaggagaattgcttgaacccaggaggccgaggttgtagtgagccaaggttgcgccactgcactccagcctgggtgacagagcgagactccatctcaaaaaaaaaaaaaaaaaaaaagaaaagaaaagaaatagaaaaaggggttaattactactgactttacagaaataaaaatgattataaaggaatattataaataacatatagcaacaaattggataacctatttgaaacaaacaagaaataaccataaaaatgggcaaccagcagccattcttttttttttttttttttttagacggagtcctgctctgtcccccaggctggagttgcagtggcaaaatcttggctcactgcagtctgtgcctcccggttcacaccattttcctgcctcagcctcctgagcagctgggactacaggtgcccaccaccatgcccggctactttttttgtatttttagtagagacggagtttcaccgtgttagccatgatggtcttgatctcctgacctcgtgatccgcccgcctcagcctcccaaagtgctgggattacaggcgtgagccactgtgcctggcccaggaatagccattcttttattcctctactttctttctttcttttttttaaatcgaaactattttttattaaaggaaggtgcatttagattaaaaaaaaatttttttattcctctactttcttaataaacttgctttcacagtgctctgtggactcaccctgaattctttcttgtgggagatccaagaaccctttcttggggtctggatccagaccgctttctggtaaccaccatgggtcctggagtctgtggaacctgttcccagacacccctacctcacccccacccagcccatcaccactgctgtcctgtcccagcttctggttgcagagtgacacggtaaactgtctggggaggggaggttggttgctttgtgttttgcaggaaaaggcctggttgtgatttataagaatcacagacagagctctccaggggtgggaccaaggggacacttggggtctgtgaggaccaggggctgccatggctgatgggagttcagaccccgcgtgccgcgccccaattccccaccctggccccaccacccctgcctgcctcactccaaccccaccatccaaactccatctcttcctgctactgaccccatcttccaacctccacctcctggccccagagcccctatgctcaaccccagcttgaccccggagccccacctccaccacaccaaccactacctctgactctcatccccctgcctctccccctgccctgccccttgcttcccaccccagggtctgctagctcctcccacctcatctgctcagctctggagagaattgggaacccatcctttggtgaggtggctgctggtgagaaagaaaatggtatttgaggcttttactcatcaaggaagggaatatccccctccccctcccaggacttgcaaggcagcgcccagccccctcctccttcctggtttccagcctcctgtgtggtttccatggattcagagatttccttccagcacctgagccccgaagtgagggggaggggagggaggggaagggcccagccatctaggggagggtggtggagaagctgctccaggacggaccccacaggtccgctggccccgtcccctgctcccagagaccctgaggctgggcaccagaggacttgctggggactcgctgggggcctgacaaatcccaccctccttctggatggcccaggggaggtcatcccattgggtcatgttgggtgagaagagctgtctcaaatcctgaccctgtccctgaccttgacccctactacatcccaaatcccaagacctggtcccagaatccaagccctgggttctgacattcagtggactgtgaggaggacagttcagggaagggaccaaggacatccctgcatcagcctccatcctgctgagaactcactcgagtcctgtgtttctggggctccagtgctgcctgcatatctgggatcccagagagaaggcgagaagggtttatggtggggagttagtgagcatcaggcacttggggttctccatcctgcccagcatggccccttccagaacaggcacacggtgtttacgacctcctccccctctgccagagtccccactctgccagagtggcaggtggagaagctgtgggcactgtcgtggtggctgcccagaaccccgacaccctttctcttggagggcagctagggtgcaggcccaagcacggccaggcccatgcccctgcccaggcttagctcagccagaaaagattcgtcgtggctgcagcagagcaagaatcagagccggaggctggggcagctgtggtggctgcaagggcagagccagttgcccacagaaaagctcggcccaggtggggttccttccccagcccaggacctcacaggttctaagagctgcccaatatccttccgatggggtccttttctgcatacatttgtctgcgttcatttttattggttgcggttgagagctcatcctggcatgacatttgccagtgggtgggtaggtggtctacactcttggttaggctcttggagaccaactgagatccagagggactactaccatatgaggacccagtggtcctctgccctggcttccagtagaacctgctggagtttatttatttatttatttatttatttatttatttatttatttattgagatagggtcttgctctgttgtccaggctggagtgcaatggcgcaatcatggctcactgcagccttgaactcctgggctgaagccatcctcctgcctcagcctcccaagtagctaggactacaggcatatgccaccatgtccaaccaattattttattttttgtagagatgggggtctcactatgctgcccaggcgggtctcaaactaccaggctcaagctatcctcctgcctcagcctcccaaagtgctgggattatagacttgagccactgcacttgacctcttggagaatctttaaaagcttctagcaggtgaggcacagtggtttgcacctgcaatcccagtactttgggaggccatgggaggaggatgacttgaggacaggagtttgagaccagcctgggcaatatggtgagagctccatctctaaaaaacttttaaataaaacaataaaataaaagctgttagtgcctgaacttcaccccagaccaagtaaaacagaatttctaggcatgggaatttgtggaaactccctcagagttttcatggggaatactgggatttttgacagctccctggttgattctgctggaagccaggaccaagaaagcttcaagacagagtcctccccaacagggacagtaggtgctgggggcaggggagggaaggcagggggagcccctgggcatggcctcctctcttcccaccctgtgcgtgacagctcccccttggtccccatccctctgccttgcgcctgcctcccaaaggctgcccacgggtcctgctcccttttcctctttgtcccttcatcgcacagtccagatcttgcctcagtcttcacagtcagcccagatgactcatgaaacctggaaaggaagccattcatttgcaaccttaaaacagtcctcttctttgacccagaaactccgctcctgggtatacgctcagcagaaatgtgagccgacgtctgctggcagacacaggcgagaggtggctcatagctgcactattcaacatacccccaaactggaaactccccaaatgcccatccacagtaaactggatgaataaagtggtgttttcatccagtgaaattcacatcacaaagaggatggatgtcagaagcacgacactgagtgagatcagctagacacaaaagaatctgtgttgtatgaccccatttatttaaagttaagaagaacacagaagccaggcgcggtggctcatgcctgtaatctcagcattttgggaggccaagacgggcggatcaagaggtcaggagttcgagaccagcctggccaacatggtgaaacgctgtctttactaaaaatacaaaaaattagccaggcgtggtggcacgcacctgtaatcccagctacttgggaggctgaggcaggagaaacacttgaacccaggaggcagaggtttcggtgaatggagatttcaccactgcactgcagcctgggccacagagtgaggctccatttcaaaaaaaaaaaaaaaaaaaagaggaacacaggaaaaactaatctaaactatgggaagtcagagtcatggctcccggcaagcagtgaacggaaagggacacaggagggacttctggggtcagggatggcaggtttaactcgtctgggtggttacaggggcatatttggtttgtgaaaatgtaagaagctgtgtgcttacagctatgcacttttcagtgtgtattattcttaagaaaagctgtcacaattaatctagctgccctcaaggaggacaggggagagaaacgtttgtattcactcttttcaaggcaggaaagaagaaaatgtaacctgttaggtttcctttttttttcctttctttatttctctctgtctctccctttctttctctttctttctttctttttttttctttctttctttcctttcctttctttctttttctttctttttttttttgagatggagtcttgctctgtcgcccaggctggagtgcagtgatgtgatcttggctcactacaacctctgtctcccaggctgaagcgattctcctacttcagcctcctgagtaactgggattacaggcatgcgccaccatccccggctaatttttgtatttttagtagagacggtgtttcaccatgctggccaggttggaggtttccatttttaaaggcagttggacatttatatcctgccagggagttccccctactgctccccaaaagcttccttttactctcacacctggattgcactagactccaaggaaggagaaaacctccacttgggggctgggagacggggacaggaggagcagcagcccagcccagcccacctctttgtccctcagaatccactgaacacctttcagccttgtcccgctgggacggtcaggattttagggctctggggatcacttcttattctattttttttgtggggggtggggcacagaatctcactctgtcatccaggctagagctgaagtgcagtggcgcgatcaattttgtttgttttgtagagatggaggccttgctatgttacctgggctggtcttaaacttctggcctcaaacaaccctcccaccttggcctccccaagtgctgggattatagtcatgtgccactgcaccctgttcacacgtcatttcagatggtaaaaggagccaagaagaaaacagaccaggatgaccaagggactctagagagggtagagatgacactgaagctgagggttgaaagggcctgtctcctcctcctgccaacattggccttggcctcaagtgatccttccacctcggcctcctaaattgctgggattagaggcataagcccccgtgcctggcctcactccctatttttgaaactgtctcttgcttgcctcccaggtgccctccttctcctgactgcccctctggtcagtccttctccagctgctgagactcagcccaacccttgggaagaccctgtcttttccaactgcccatgaggtgcaggcaactccagcagccctagttccagctcagagtcttccctggctccatttctgtattgcccatggcccctctcagttatttccaggtgtattcatccgttctcatgccgctgataaagacataaccgagactgggcaacttaccaaagaaagaggtttattggactcacagttccacatggctggagaggtctaataatcatggtggaagaggaaaggcacgtctcacatggtggcagggaagagaagagagcttatgcagggaaactccccttttcaaaaccatcagatctcatgggactcatttgccatcaagagaacagcgcaggaagacccgtccccataattcaaccacctcccacagggttcctcccacaatacaatgggaattgtgggagttacaattcaagaagaaatttgggtggggacatagccaaaccatatcaccaggcaagacaaagccttaaacaggcacagcttacccaccgccctgctcactgccttggtattccccatctcagaatccacgaggccagctgtccacatcagagactgggtgttgcccactttcaaagatacatccaagccatcaccaaatgctgcccatccttctaaatatttctggaatccctcccctcgcccagccctagtctccctgccctggccaggccccctcttctcccaccccggttatcactagaaccttcaacaagaccctcccggcttctgctcagcagttctttaaatgaaaatgatctggctgggcttggtggctcacacctgtaatcctagctctttgggaggccaaggtgggtggattacctgaggtcaggagtttgagaccagcccagccaacttggcgaaaccctgtctctattgaaaatacaaaaattagccggccgtggtggcacatgcctgtggtcccagctactcgggacgctgaggcaggagaattgtttgaatccaggagatggaggttgcagtgagccgagattgcaccactgcactacagcctgggcaacagagtgagactccatctcaaaaaaagtttttgtttttttttttaaataataaaagcagtgtgatcttctccctcctggctgcttacaaggatgctacattactcttaggccatcggagtgaggcctcaagcccggctgcattttagctatgcctggatcccatccccagccccacctgagcctaactcctgggtgtggggcctcaaacattggtacaacttgaccgtctcctgtggtcagctccagccccatcttcctgtgttctccttaccaggtactgggctcctaggcttctgcacatccaagacgctgtgcccctgcctcaggcgctggtcctccctgccacatcctggctccacctccttcagatatcaacttggcccctttctctccttccctggccacccctgcctcctgcctgcccactgcccttgctgtatgcactcacccgcacctgcgtcatccccatcaacccacactctcctgggaagccctttgacttgtctgtgttcctgtggggagatagctcccaggagagcagggctcaccccagcttccacctgcctggcatggagtacacactcctggacaaagactctctcctcggccacactcaggctcctccaagccttcttcttgatgagggctcaaccttggcctgtaagaattgctgattcggcggggcacggtggcccacgcctgtaatcccagcactttgggaggcagaggcgggcagatcacttgaggtcaggagattgagaccaggctggccaacatggcaaaaccccgtctctactaaaaatacaaaaattccccgggcgtggagctgtgcacctgtagttccggctactcaggaggctgaggtgggagaattgcttgaacccaggaagcagaggttgcagtgggctgagatcatgcctgccactgcacaccagcctgggcgacagagtgagactctctcaaaaacaaaaacaaaaaaagaactgcagactcttagcccatttccatccaccagcacccctgcacccaccaatgcacaccaagagacttggagcaaactctagcctggggtctatcagctgaagactgcattcttgggaagacccagaccctgcttagagaactcaagcctgccaaaaatatttactgtctgttcctgccagcatctgaagatagggccctaatttcaataagcaccagttagcaaactcagatggcttaaccccagtgatcaacctcccctccccaattttctttttctttttctttttttcttttttgagatggaggcttgctcagtcactcaggctggagtgcaatagcgtgatgttggctcactgcaacctccatctaccaggttcgagtgattcttgtgcctcagcctcctaagtagctgggattatgggcacaaacagccacgcccggctaatttttgtatttttagtagagacagggtttcgccatattggtcaggctggtctcgaactcctgaactcaagtgattggcctgcctcagcctcccaaagtgctggaattacaggcgtgagccaccacacccagcccctacccacttcttatttcacctccctgactctgcacaaacccccactggttccacctccacccccttttccctttaaaatgcccagtcaccgctacctgggttagagttgagctgagttctacagtaaagtctctcctactgcagtagttactgactgaatagcatccatctttaccacctctttttttttttttttttttttttgagtcagggtctcactctggaggctgaagtgcagtggcacgatatcagctcactgcagcctcaacctcccgggctcaggcaatcctcccaactcagcctcccaagtacctgggactacaggtatgtgtcaccgtatctggctaattgttttaatcttttgtaggtgaggtctcgctttgttgcccaggctggtctcgaactcctggcctcagcctcccaaaacactgggatgacagacatgagccaccatgcccggtgtctttaccagctttaactagcatctggctttgtgtccctccaacatcctttagcagtggctgaacgcttgtatgacagacaggtggaatgtgaacaacctcattcccacctcccagaggaagatctgaagtcctgtggctgttgcacttggacaagcccacgcaggagggagtggtacccgctgagccaagccccctgctcctaagtgagctttccaggtgtcctgatttcctggggccactgtgatgaatgatcatgcgctgggtggcttaaacaacagaagtgtgttctttcacagtttgggaggccagaagtccaaatcaaggtaacagcaaggtgggttcctcctggagtctcccagggagaatgcatttcctgtctctccagctgctggcaatctttggcattccctggcagcatcactccattccctgcctctgtctttgcatgacgttctcctctgtgtcttccttgtgtctgtcccttaaaaggacactcatcattggatttagcacctgccctaatccaggatgatcgtcatcttgagatcctttacttaattacacctggaaaggttcttattccagataagatcacattgtgaggttccaggtggacgtatcttttatggaccaccatccaatccactacaccagggctcagcggtgggtaccctcccttctttctggcacagatgctggcatcactagcgtgggaaggcagatccatgaggtggggagagctggccagggatggtctcaggagtgtggaggggcctgggatggagaacctgagacccccctgcaacccagcttctggcagacacaccctcctggcctcctccccaaagacaaacactcggtgtaaagagacctgggttcaaggcctggcttcactccttgactcatgtgatctctggcaagcacgtgccctctctgggcagagatgattccccagctcctcacagccctggctctgggactctgagtgggagctgacagcaagagctgtgtgtctgcatctcagagcctggcaccctttacgtatcagagcacagaatgacactgaagaaaggagtgattgagcagtggctgggtgtgccttgggatgtgctgaactgggcatgtggtgggatctgggaagcccctgaattccccagatggtcatatccccactgcagaggtgatgttccctgctgatataccactggtggctcagggttgggccatgcatattctatcactggaggatcaggacatgaggaccagccggggtcaggagtctgcagctgtgcttaggcaggaaggtgaggagaggaccaatatttactcagctccatctcctttcagtctcataatgtgccaacaaaataggtcccattatatgcccagtctatagatgaagacacagaagctcggagaggccgagcaacttgcccgaggtcacatagttcttgaatagggcaggattccaacttggtcaattaggcttcagagttgctccctaacacatcatcttcacccctgaggccaggccagggctctcagtgcccagagtagaacaataaacacatcacacaggcttatcaaccacatcagggaccctgtcattctattctcaaaaaatatttttaaccatggttgcattagggttgtaagattttcagagctctttttctgtttttcaaatgtttgctaatgtgcttatatgatctttatcattaaaaaggtaaacattgaaaaaatcatctactaagtggcttctgtcaagagtgcagctagggtagttgtcattcggaggaggctattccagggacaaaccaacaatttaaaggttttctgctgggtgcagtggcttacacctgtaatcccagcactttgggagaccaaagcgggcagatcacgaggtcaggaacttgaaaccagcctggccaacatggtgaaaccccgtctctactaaaaatacaaaaatcagccaggcgtggtggtaggcgcctgtaatcccagctactcgggaggctgaggcaggagaattgcttgaacccgggaggcagaggttgcagtgagcagaaatcgtgccaatgcactccagcctggcgacagagcgagactctgtctcaataataataataataataacaacaataatgaattatccaagccctgtttcccttgtttctacccagatcaccaaaaagtgtatttctctgctttcacacagagctgtttttaccaaaccatgtcttaacactctgtccttggtttcggctggggatcagtagattaaatgtgcacgtgtagattgtctctttatttcccacaaaactgttctctcaaacaccgcctattgtgtccttcacatttcttgcaaagatccaattgacaaactcccgttagcttcatagccgggagaaatgctctcttgatcaatctgtaagctcccgaagagctcaaagatgtctgttttcacccctgctattttcacagcgcccaataaagtactaggcatttactctgtgctcaaatattgctttttgagtggaaaaaaaaggcgttgattgactcatacagctgagaagtccaaaggaatgtcttgcttgcttcagttacggctggatccaggggtccaaattgtatcttcaggaccctaccctccctcttttggttccgttttcttgtgttactggcttcattcttgggcaggctgactgcctgtagcagccaaaacagccactcacatttcccaaagttccttccacacaccggtttgcaagcctggagaaaagagggcaagcactcagttccccaaagttccagggaagatgcccatcagctggcttgggtctgtgtgcccatcgctgaaccaatcagggtgtctggggggaatgacgtaatttcattggccaggtctgggtcaagtcccactcttgaagccagggggcggagtcagctgcatcccactcaaggacacagcaaggatgggctctattatcagaagaggaggtagagaaaggcaggctgggcaggaagctagagcactgcagtttctgcaacatcccaacctggattcctgattttgccgccatattgataaacggtgcagccaccaactctcccgttcctacagccagaaaattattgattattctttgttctttctttttttcttttcttttcttccttccttccttctttctttctttctttctttctttctttctttctttctttctttctttctttccttccttccttccttccttccttccttccttccttccttccttccttccttctttctttctttctttctttctttctttctttctttcttttttttgtgagacagagtcttgctctgttgcccaggctggagtgcagtggcgtgatctcggctcactgcaacctctgcctcccgggttcaatctattcttctgcttcagcctcccaagtagctgggactacaggtgcgtcccaccatgcccggctaattttttgtatttttagtagagacggggtttcaccatgttaggatggtctcgatttcctgacctcgtgatccacccgcctcggcctcccaaagtgctaggattacaggctgagccaccgcgcccagccttctattaattaattaattaatttatttatttattttgagacggagtctcactctgtcacctgggctggaatgcagtggcgagatctcagctcgctgcaacctccacctcccaggttcaagctattctcctgcctcatcctcccgagtagctgggattacaggcgcctgccactatgcccagctaattttttgtatttttaggagagacagcgtttcactatgttggccaggctgatctcaaactcctgacctcgtgattcacctgcctcagcctcccaaagtgctgggattacaggcgtcagccaccacacctggccaattctttgttctttcctttcactcccttgcaggctggtagaaacttgaggcatgtggctactatgttcagccatcctgcagtccagccccagcctgggagctgctaccccccagcccacatccagctccgagaaccctggaactgagacggcattatacccattttatgggtaaatgtgccaaggccaagctgaactaatgatgtctttcctaagttcacacaggaagctggtggtagaatctgggcagagtctaggtctccaactacttggttcagaaatacacccactcatgccccactctgtatcctatggccctggtgcaccaacagaccatcagcaccaacaagccaagctcccccatccaaccacccacctccagcgcagccagaccccagggttcaaggcttgggggcactgggctccctcagcagatgcatgtgcagggggcaagcctcctgtgtgtagaaggaaactgtgacagcattgaggatatctctccttgggagttcctggcttctggatgcccacgcagctggcaggtgtgtctgagcatgcactagtctctctacaaagcaagaccccgcatgaccaaggcttggaggacctggagccgagaccggttgctgctggggacacatgtgtgtacccttgctcatggaattcctggcactgggacatcatagtctctgatacagaagaaaggaagtgctgtggctcagattccaactcagctcgcacagcgtgggacccccgaaaggcatctggacaagtgcaaggtgcagctccaggcagcgccccctggagttgtccatcccgccccggcatcttcatttatggtatcttgtttcttccttgctacagctcccagaggaaggcatatggtcatctgtgtcagtaggggcccccaggaagcaggtactgagatggggttggagatgcaacaggtttactaggggtaaagtctatggaagataacaggggaggaagtgattgggcagggagagccccagacactaatgaaagctcacaaagtttcagccaacctattggggagctccgcagtagaaagtgcccacaagaggagtccaggttaggcacaaatggccaggtcctgggccccctgccatgcacagtcgctggttgacgaatgcctgggaggagcctggcttcattcagctggaacgctccttgcacctcaacagcaattctagaagggaggcctgagcaccttcatggcagcctcatgatccatttcacagatgcagatgccagagtccagaaatgtcaatgaccctcccaaaggcacatggctggcacatggcagagccaggctggcatgggagcatctgatcccaatgccatgctcctgtcagccccagagtgactcttggctgctaagatgccctttgctactgctgggcaggactctgggacatgtttcccttccatcctccagggacagtgacaaggtggcctgacagagtgcccaggtccctgctgagccccggccaaagctcctgtccctgggaaacatgagtagggacagcccatgtcatgcttcagtctttccaaatctcaggaaactcttgggtagagaagccacttcaatgtggcagcttcaattctggcagggattcatcaaaagtccacagtgtttcccgcaccttccaggtcccctgtctgtctggggtcacccaggaccatctgtctgtcaccacagcggtgtggaatgctgaggatcacctctgtggtgacagacagatggccctgggtgaccccagacagtcgaaaggatgacttacaagtggcccaactggagagattcccatagggctggctgcagtggaaagttgctgccaaatgcccatctcgttccataaccctctcttggtgcagcagcagtgcatacaagtgtcccagagggacaatgacggctgcttcagcttgaatcacaagggaggaggtagggtgctggatacactcaattatcaccccaaaccctatcatcactcataatctgcctgagataaatcacaggcaggtaattattatgtcaggccaggtagcagagaggagttctaaaatagcagtcaaggaacttcctggttaattcaaatccatcctaactccctccaggggacaaaagtgctttggctgtagaattgaccaggcggagagaaatacgattgcttgatgcaaaatgggaactcctggacttaatgtttctctctgtcaagtttcagaatagcacacctgtcagaaaccctaaatcaatgatccaccatccggcgtaaatcatactgcagggatgtcctattttcttggtgtcaaaaccaacctccccagcctgctcgccagaccgtgtccacttctgctcagcccaggcctctggacccaattagtcctgcctgcttggcttcccacacctgtacttcttcccccatccaaatgccaccaaggcccagctcaagccacctggcccccaaaccttctatgcccaggcccatccctggatccagcttaagcgattccacttcctgtccccactgcaaaaggccaatgctgggtttatccatccctgaactggtcacaaccccagatctgtggctctcctagagctgggtctccctgttcttatccttttggcttctggagccagctcttctgctgggcaacagaaactgctttggattcacttaagccagaagagtggaggtgggtttactggaaagatgctgtttgtggggaggtttcttggagtgccaaggagcagaacacccgattcacccgggctgagtagacccctgtccagggcaggctggcctcaggtggggctggattcaggcacaatctctgggctctggctgactctgtggacgactttcctaggctcttcatggtggcagagtggttgcttacacctgtccaagtgcaggtccacttggacatggcagacgattactccaagttgctcagacaaaagccctgggctagggccaggtgcagtggcttagcctttaatcccagcactttgggaggccgaggtgggtggatcatctgaggtcaggagtttgggatcagcctggccaacatggtaaaacccgtttttactaaaaaaaaaacaaaaaacaaaaattagccaggcgtggtggcgggcgctgtagccccagctactcgggaagctgaggcagaagaatcgcttgaactcaggaggtggaggctgcagtgagctgagatcacaccattgcactccagcctgggtgacagagtgagactccatttcaaaaaaaaaaaaaaaagccctgggattagtcttcatgaggcctgactatgtgaccagaggcacatgcccacctcagggccaatcctggtggccacgggagagcagtgttctcatgggcagaggccctgggtcacaggctgctgcccaggtggacggggcagctccacctgcagctcatagactgagaacatgggagtagtgattcccacaggtcaatcagggcaccaacaagaaggaatggatggtgggcagctccagaccaacaaacaccgagaagttggctctctggaccagagagactgctgaacaaaatcagactggcctggaggctggagttttggggttttcctctccctgggactggccatgaataaggcactcaacttcaccacctctggttcctggaagagaaaatccacttggccagttctgaatcacaggtgctgcggccagggcctggccgagtcttgggtacatttccagagaaggcagaaagggctttgagagccaggagacatcctcccagcagctgctaaaatgtggatgtcgctactgtttttgtttttttttttagacggaatcttgctctatcacccaggctagagtgcagtggcgagatcttggctcactgcaacctccgtctcccaggttcgagctaccccagcctcccgaatagctgggattacaggcgcctgccactgcgcccagctaatttttgtatttttagaagagacggggtttcaccatcttggccaggctggtcttgaattcctgaccttgtgatccacccgcctcggcctcccaaagtgctgggattacaggcatgagccactgcaccctgccggatgttgctaccgttgcaacgcaagccaccttaactttttgtttaccccaaattagaaattaaacaattttattttcaatgtcaccagtatgtgatgcaatttcatgatgatggtttatctgagtagaaaattgcccttggtatctattctaccctcctctgctctggaggcctgggtatagctgaagccacagcagggatgggggcaggtagggagtgggagttggcgagttgcccattttctcccttccctggggtcaggaggaaaaaaaatgccattaattttgttgtgatgaaaaccccatctctactaaaaatacaaaaattagccaggtgtggtggcaggtgcctgtaatcccagttacttgggaggctgaggcaggagaatcgtttgaacccgggaggcagaagttgaaacagcgccactgccctccagcctgggcaacagagtgagactccatctcaaaaaaaaaaaaaaaaaaaaaaaaacccacagataaatttggagagaacttgaatctttacaatagcgagtcttctcatctgggaaaggcccatttctctctgatcctccaggatgttctcagctccagcccctctcccccaccatcccaggaatagcagtgaccttttgtacatatgccttagtccctcatcctccagatacatttaagcgctttgtctcaggcctccctgccaagcccacatctgccaccagcctcgtgtcctctcctccccagcctcaaatcctgcgctggctggatttaggaacttgggcggcatgttcctccacacctccaggctgcggttcaccggcacgctcctcctgtctcatccaccagggattcctatctgtcccttacattgtttccctctctgtagagccaagcgggaagggccatgttcacctttcagctcggtgccccacccccatcccccagttgctcactcacatgcacaagttcatcttgctgcaccaatgagtcttctcctccatgctcacccagtcttccttggatccccaggtgtcgtcctgggtgtgtccggtggtgggtgctcagtaaacgcttgctggatggaaggggagacagcaccactgtggggggcggggactgtgtttccaccagccctcggtaggatctttttttttttttttttgagacggagtctcgctttgtcacccatgctggagtgcaatggtacaatctcagctcactgcaacctccgccacccggctccaagcgattctcctgcctcagcctcccgagtagctgggactacaggcgcccaacaccactcccagctaatttttgtattttcagtagagatggggttttgccatgttggccaggctggtctcatactcctggcctcaggtgatctgcccgccttggcctcctaaagtgctgggattacaggcgtaagccaccatgcccagccctggattgagaatgttctaaagacaagagcttttgggaacgctgcagcaggagacttgcaggtgtgcagagggctcttgggggcctcatgagcagctggaggtgacccctctccccacatgtcttaaacaagggtacttggccaagacagtacaactggaaataaagacaacgaaaaacagtccaaagattagaaagcaagagacaatattatcattcttggcagagaatgtttatatttacccagaaagtccaagagaattcattgcaaaacagaactgctaagaaagcctggaaaagtggcctgataaagacccatagcttcctgcatgccagggacgagctgactggaaaataaagtggaaaaggcctcattcacagcatcaataaagtgataaatgacaccagcttaacatgaaataggccagacccatacaaagaaaaagagaaaaccataaaaagggcaaaaagacgtgcctcgttagagagaaatggttcttccccggatgggaaaacccgctagcgtgaagattcaagttctctccaactttacccgtgtttttattgcaattccaatgggaaaataattccaaaaacattttcactggtgtttgccagaaaaatgcttatgttcctcaaaaagaggaggtgcaggctgggcgcggtggctcacgtctgtaatcccagcactacaggaggctgaggcaggtggatcacttgaggccaggctggctagcctggcgaaaccctgtctctactaaaactataaaaattagctgggtgtgttggtgtgtgcctgcagttccagctattcaggagactaaggcaggagaattgcttgaacctgggaggcagaggtttcagtgagccgagatcatgccactgccctccagcccgggcagtagaggaggtgtggtagggctgaggcgcattgccatacccctgtgtgcatgcctgaagggacagggaggggacttcctctccagctgcctagaggaatattgcagccagctctcttagcaaagccacatggtcaccgtgagcttgggaagtgtgggggcacctcctatgtagtactggctctgagaggcttgggccttagtgctgttttcccctagtgggggtccctggacaaatgatgttgccagcagtgtgttccaaaaccaccacggtgggagggatgagcgtctcctgcaggtcatgacactccaggctggaaagcatcagagaacagagcatggctgtgggccctggggaaggggacctgtcttagtctgtgtgggctgctataacaaaatgccttaagctaggtggcttataaacaacagaaatttatttttcacagttctggaggctgggaagtccaagatcaaggcccaggcagattcggtgtctggtgagagcccgttttctggtagaaggtggtgccttatatggtggaaggggccagggagctctttggagcctcttttatatgggcactcatcccattcacctcccacaggcctcatttctaacaccattacattggtgattaggtttcaacatatgaatttggaggggagtgactgaacatccagaccacagcacgatctaattggctgagcccaactcacaaactagacttgcgagatggctgtctgccgaggtctccttggccctgaccgggcagagggggctcagtagggctcttgagggtctcagcattgtgaagagcttggggcagaagggtagggcaagacaggaggatggtgagggcctggctgttggccacagagtgacctctgtccccaccctctcccggggcttcctagggctgggaggcagagcctggagtcttctctggtctgcagctcctttgttgtgtgacctgaactatgcttctgcttggtgtctcagtttccccattggtaactggggcgttgactggatttcagggctcaactgggctccctttctcggcaggtggaaattgccatcttataaaggggaacctggatgctgctggctgggagcactgggtggaccaggccacagccgaaggcccaggagaggtggagagaggctccatcctgagtggggctcttctaggccctagagtctcaggccactcatgccactacagagggagagacaggggctacatagggagggtgtggaccaatgaggggttcagggttcccaatcccacatcacgccttcccgtgaacctggagatctctcctgtcccaacaggcctggaaccagctgttggcatcaaggccttgcacgcatgacccagacagcttcccctctccctccttccagcctgctgcttccatactagattcggggccattttgccgcaggattcatcggagggccgagagggagctgccggcttttccacctccgagccgaggttactctcagattcatgggaagccataaacccgcgccctatttctgctctaattgaagcgatttgtattgtgactaaaataatcagagacaattttattggtatatttttaaaaataattacagcccatatatttatgttatataactgcagtgacaatttgattgggttccccagggccccaacttgaagagcctgtgtgggagtggccccatccctgccttcagcaccctccacctcccccaaatctcgggcagaggtgatgttgacagatgcagtccccaaggcctgaggctcggtcagggacttttcagtgggcatgtcttaaaaattttgggacagccatgccagcccagcgaccccaaagcgccgtagggaggttgggaagagatggaggggggctctggagtctggctcagctctggcctttgtggtgggtgtctgtgccctgccatccagcatgcagtcactgaccttcttctgttcttctctggggacctcctgcctttgtcctcctgcttctgaacagctgactgtcccaaaaactctggggttgaccaatcagagcatcacattctccagccatggtgattggttcagggctaagcacatgacccaatcagagccaatgacattgcacatgccccagatggactcccgaacggttggggatcccgagccgcaggctgccatcttgccccatgtgggcactggagaatggggctagtgtagagaagaccctagaagagagatgtggatgggacagggtccttgtggcatcatttgagattctgaacctggagctggggctgctcccagagtttttggatatatgagccaatacatcccattttggcttaaacctgctgtagctgtaggactgtgaccaagagttctatttctatgagtcccgcaggcttgtttccccacctctaaagggagagagtaatcactcccgtggtctgttatgcctcgtcattatctgtgtatagtagagatatcttggtgtatagcaccaagcacaggacttggacagagttaaccactcaataaacagcagccatggccgtcgtcaggagcattgtggagcactggatgctgtcgctggtataaggtgtgggcagaggagacagggagaggttaccaggcaatgtcccagcccagaaggaggccctgcccccacatgcttataggtggcagaagcacggttcctgctggctcagcaatgcctccttgccttcttccatcagggcccctcctgctcagccagggtcccgtactgtgcccaaaccagttctgcattgttcctccccaaatagctcaggctggaaggaaggagctagggaagtgaggaggggctagggagggggaagagcagcggccatagctccagcacagtaggatctgactatgggcgggagagcctcgatcgcggggtgctctggtgcccaacttggctccttcctcttagcgatcgccccagctctttgctgagctgttggatgcctcagtgttcccaggcaaatccccctggggccctacctttggagctgagctgtgtctggcctgcacatccaccagcaccacaccaacaccgggcactgaagaccaaaagcggatccaaactcccacccgctctgagcaggttttctctcctacggcagccttcacccggaagccacagctgttaaagctgctagcgggtggtgagggccttgtggttctgcacccaagaaagccttctcttcactggcttcaaaccatcttagtcttagatagcagcacgggcctcagggatagcccccaggtctaccttgtgggaatgacaccttccactcctggaggcttgtcccatgagtccactaatagggaaagggctgaaaagagcgctggggctgaaacattcagctggctgttgggtccccaggccctcctgactgcacagtttagtggagacgtgcaaactcgcccagttgcacacactcacatgtacacatatgcacacgcacacacacacgcacactttcacatgggcatgccacacatacacacatatgtgcgtgctcatacccacgcacactctcacatgggcttgtcacacatacacacatgtgcgtgctcacatccacacacactctcacatgtgcacaattgcacacatgcacactctcacaggggcatgttcacacccacgcacactctcacatatgcataattgctcacatcggcatggtcatacacatgcatactcacattgtgtacacttacacacacacacacacacactcctacacatgtccacactctcatgcatgctctcacatgaaccaaaatacttgcctcttctgcctatagcagagcagaggtgcgtccgtcgatgccccatggtgtttctcaggatccacgcatcccatgtactgagtgttgttagccgggagattgcctgctcctgtgtggctgcgctctcaccagtcctgaaggtccttataaacattggtgccacccatcttgtaggacattctctgcccggccccaggagcctcagcagaggtcccctgatttcaaacattcttttctgtcattagagcttatgttccacagatgactttgaaaatcttgccaccttcacaggcccagacatgacggtgcagaggacatcaggaccagcaggacataaaaccctcacggtcacagggagaaagtcagatcccgggcacctgacacagccaagccctgctctcaacatgtgtatgacaatgggtgtgatagaggtgccccctgcctctgggtctgggttacatgcccccttctttgagtcctagagggaacagcctgatagtgggcacaccccttcctctccctgaaatgacctggcagacccccttcccccagtgatggccttagggattcccagccatcacccctccctccaggaacccctcatcccatccttccatagggccaccacacagacaggccctctcgacctttcccaccatgctctgcacaactaggatgggcagtgccccacccaaagcactgcatgccccgctccccattgtcacagtaggtacaggacatgggtctattagatcttagacactacagtccgtacatgccaatccattcccagaagacctcccctccccaccccagtgtcactgagccacttcctccagcacagccccacggagggaggcccttttgtgtcttgcccatcacctggctggccagatctgctcagctcttccctgactcaagaaaaacaagagagcttcattagtccgttttcatgctgctattaaaaactgcctgagactgggtaatttataaaggaaagaggtttaatgactcacagttcagcatggttagggaggcctcaggaaacttacaatcatggcagaaggcaaaggggaagcaagacacctccttcacaaggcagcaggaagaagtgcagagcccaagaggaagagcgccttataaaaccatcaggtctcgtgagaactcactcactatcacgagaacagcatggggaagctgccctcatgattcaattacctccacctggtctctcctgtgacacatggggatataaggattataattcaagatgagacttgggtggggacacaaatcctaaccatatcaagtgctctgtggtcccagataagccaagaaaccttcgtggaggaggccacccccacccttggcctccagacccagtgggatgcctaggtaaggatggaagtgtcccttaagagggctggcatggatgtcacatgttccatggcacaccttgagggtaggcagccttgagcagtgggcggggagctgggcctgcagggacacagagccctgaggtcttgtccttggacccctgatctgggatcctcaggggctctgggagaaagcccctgtcccctgctggtgctggtggtgtggtacagataacctggaaaccctaaaagaagcagggatggagggaaggttgctgagaggtggtcagagaagctgttatgcagactgggggccagggaggtacaaggggagtccagatgggggctgtgggagggacagacagacagcagactgggtcacccccaggctccccttctgggccccccaggaaacgaataggtccagcccaaaaggggctctgggaagactgctcccagcacctctgtgctgccagccctaaaggcacccacccgacccccacacacgctgaatctccactccttgtttgcaggaggaaactgaggcccaggagcctggagatgtgtctgctccaggtcacactgtgggctgtaggggtccggaacccagacatgtggactgcgccaggctctagccaatgactcctccaaaccactgcacctccccagccctccagagttctcatctgaaaaacggggcatcaggtctgaaggtcttcaatgccccttctggctgggatatcagagttttgggacctctctctccaggtcctcatgagtccagcaggagctctggcaggtccagggtcccctccttccctctgctgccactgctcagcacccaaccctttttaaaattagctctgtgagttacagaagtaatccctgctttcttgttaacatgtttcaaacagcacagaagggttcaaggtggaagctgaaggtactccccagtctcccccacaacccccagcccacctctgctaggtcccacatggcctttgggaaacatatgcattgttccctcttcccatagaagccagaagggaagtctggaatcagtgagccaggtacagctctgggcccaggcccagagatcccacactcatgccagcccctacccacgccagccccctccctgtgccagccaccgcccctccatctatgcaggccccctaccaccaagcccatcgataggggctcattattccgtcctgtctccctaggatggggcagagtgacagctgttccgtgtttaattaccgatgggctgaggctatgccaacccatgaataaaattacagttgttctgcaatgcaaatattgcgggcctccgtctgagggtgcgtgcggggctgatcttcattggctgacttttttaatgaaaaaagttttattacattttaaagaacattcataatgatgaaattcacacacctcaagatttatacagcactgcaaacaagtggcaggagaaagggagttatttataacttcaaataggcttctatcctctggttgcattgttgtagggtgcagagcatttttagctgataattgctttaatggtaaatgagaaacttagaaccaaatatcggaagtgcctaaacaaggagaagcctcagctaagatgggggcgagttgaccttatgggtggggagggagaaaagggagctcgctctcgccaaggctcatggggtaagaacacatggcagacgttcagcactggcagaggtttgccatctgcgggtgcccactgggcacaggttcagcttatggagaatgaacttggagacatgacatcctcctgtcggagccgcaaccgcagggctttctcctcccatggtcgctgtgggatttcgttctgtgtggtgtatccatgctttgtgtgactggaaatctcatctgagcacagctggataggtgataatgcaaactttcgattccatcatctaaatccataccgataggaatacagaacatctgatttgatttccccttgtactaagaaaacggagcttcccagggaaggtgggcatttcctgctgaatgggactggaggtggcatttcctttgctaagccttccctgcagatccttccctctggggacgcagctgagctcaagaacagtatagctgagagaagcttctccagctggccctggtccccatctctaaacagaacagaacctgcttcaacttagcaccgtcaacacattcattcgttcattcattttgccgacatgtgtttgttgaaagcttactacaagccaggctcctggcacgttcggatgaggaggatgtagtctgtggcctccaaaagcaactgaacaggcaagacctatacgcagagacaactgagcctcactaaacatcagtgtgacaaggacagtaatggaggtataaatgcccagggacagggacagcagagaagagggcctggctgtgtctgggggtggagaggtcagagaaggggccatgcaagccagccttgaaggatgtagaggagtttggagtgggcacatgcttggcagggcagcagagtgaccatcaaaggcaccctccagcttgaggtctgtgggagggagggggactttgagtgtctggagcacggggtggcgtctatgttggggtgcaattgggatgtggtggagtgtcaggcggaggagcctgaccttcttcctggggcatctctgctgcttggagctggggttcaggggctctggaggccgcacggaatgcttatagatggtgggggcagggagggcgtttgggatagggattgggccagccagtaggcacatgagacagttagaaggagaaatcagtgactcctgcttcccttctcttggaggtcagccaagcctgggtgtctcctgttcattcagcaaaatacctcatcccggaacaagcgtgcaaaaggagacagggcaggattccaaaccagctgcaaggctccctctcggtgtccttccccacttcggcatgtctgtgcgtgcatgctggcttctgtgcatgcatgctggcttctgtgcatgggtttacatgtatgtatgtctctgtatatgtttgtgtgtgtgtacttagtgtgcgctttcatgtgtgttcatgcctgtgcgtgcatgctggcttctgtgcatggatttacatgtgtgtatatctctgtatatgtttgtgtacttcagtgtgtgtgtgcctgtgcatgcttgtgtctgtgctgagtgtacatgtgtctgtttatgtttgtgtatgtgcagatatgtgtgatgtgctcatatctgtgtgagcgtgtgtacatgtccatgtatgtatgtcaagcacaagggtgtgtgcttgtgtgaatgtgcactgatgtatgtgtttaaggatttgtgtgtgtttgtgtttatggatgtttgtgtgtgtgtgagggtgcatgcttattaggggatctgtgcctagaccagatacctgggttttttttgttttattgttttgtttttgagatacagtctcactattgtcacccaggctggagttcaatggtgcaatcatggctcactgcagtctctaactcctgggctcaagcgatcctcccacctcagcctcctgagtagctgagactacagacgtgaactaccatatctggctaatttttaaacttttcatagagaaaggggtctcattatgttgcccaggctggtctcaaactcctggcctcaagcaatcctcccacctcggcctcccaaagtgctggaattacatacaggagtgagccactgcacccagcccagacactgagatttttaaaattagtctgacactctggaacccacacagcctgacaccaccactggagattctaaagtgaatcccgtacaagccacgcacacagcccctgcccttgggtggctcgggtccctgaggtctccttggtgaggggaagaaaacggaagcctaaataacagcagctgccttatggagcagcccaggccaggctcagggggtgtgggggtaagaggatgtctaaggacagccaggctggtcctctgctcacccggagccagaagtgaggtagtgccagccaggcccggggcagcctcaggggccccgaagatgggaagggtgcccagatgcccgtggtatctgggagtgcacatgagtgtgtgtgtacatatatgtgagtgtgcaggtgtgtatatctgtgtcagtgtgaataaacacatctgtgtgtgtatttgtgtgcagataggtatgttggtgtctgtatatgtgcacatgtgactgtgtttcctgacccaggaacaactatctcttgaccaaagttaaccaaagtctcatagaagaggtggggatggggcagggaggacaaggcagacatcccactcctgtccttccccacagtagccctctgacctgccagcgtcagagccattaggaaacaagccatcctaatggctcgagacagtggccagtgggcatcgcgtatactccagggcactctgtgggacgggagttcattgttggcactggaggcctgttttattttttcttttcttttttttttttgaaacagggtctcgctatgttgcccaagctggggtgctgtggcacgatcatggctcactgcagtcttgacctcccaggctgaagaaatcctcccaccttagcctccctggtacctgggactacaggtgcacgtgccaccatgcccagctaatttttatatttttttaagagatggggttttgccatgttgcccaagctagtcttcggcttctgggctcaagcaatccaactgtctcagcctcccaaagtgcagagattacaagtgtgagctgccaagtccagccctgttcccttcttaatggcttacttggggtttcaatgatgacagggtcattactgggtttcaggaaccttccttaagcagctgaaagaatccgttgagctctgcttcctcttccctcttccaggctgaaggagctggaggggcctggggcctcctttggggaggccaggaggatttggtgattaagtgaatggaatatgcccattgtggtaaaaatagcagagctgcggttggtggaggcacagaagcccggccgaagggaccaaggggtgttcgggagggaggaagtccagttctgatgatttattaaggtgtacaaaagaaccttcagaacaaagacccagagatgcaggaaatgttgtccatttttctgcttaggttcaacgacatatggacagccatgtcgaaacagattggacaataagggctgatagactgaatggcaaaacccagccaggcctgtctatctagattcttcttggcctctctaagcagcgttcctttcttctgggtaggcggcaaggccccttctggaatggcgggggtgggggggggggtctcgtgacttacagtcaaacaaggtaggtcagagattgtgcaggtttgttacacaggtatacatgtgccatggtggtttgctgcacttatcaacctgtcatctaggttttaagccctgcttgcattaggtatttgtcctaatgctctctccctccccttgccccccaacccctagacaggacctggtgtgtgttgttcccctccctgtgtctatgtgttctcgttgtgcagctcccacttacgagtgagaacatgcggtgtttggttttctgttcctgtgttagtttgctgaggatgatggtttccagcttcatccatgtccctgcaaaggacataaactcattcttttttatggctgcatcgtattccatggtgtatatgtgccacattttctttatccagcctatcattgatgggcatttgggttggttccacgtctttgctattgtaaatagtgctgcaaaaaacatatgttgtgcatatgtctttataatagaatgatttataatcctttggatatatacccattaatggaattgctggatcaaatggtatttctggttctagatccttgagaaattgtcacactgtcttccactatggttgaactaatttacactcccaccgacaatgtaaaagcattcctgtttctccacagtctcaccagaatctattgtttcctgactttttaataatcaccattctgactggcggttttgatttgcatctctgtaatgatcggctaacaaacatatgaaaaaaagctcatgatcactgatcattagagaatttctttatggccagtttttacacagaaaggcagagggaaagttagagttatatttttaggttttatggctggctttgggggaagagcttcagattctatgaccagccttggggaagagggattctagtttttatggttagcctcaggcaagaatgggactgagagacaggagggcaggagaaggtcagagaaaaacttttgttttggaggctgtttctggggccctcattttggaccgcagcaatagctgggccagagggagagtggcgggggctcagtggtcggactcagagctggcttgtccacctgcagagctcttctccccatagatgccccctacccaggagggcgttgtgagtccatttcacaggccaggaaactgaaactcagagaggttgtgcagctgcctgtggccactcagcaggcaaagccagagctgttgcttgcaccaaggccacctaagcccaaggtgccgcctgccccatgcagctctcctctcctgccactcagcagggaactccagagtccagagatggggaccatccctggggcaggcactgggcagccgcgatgctggaaaatgctcaaggtttcctttcatcacagcccaggccacagcgcctcatttgccaactgtgttctgagaaaacagcaacgatagaaaggcaccagtgaggaggcggctggagctctgggctgtgaggctgcgtttcaggattgagaggctgcgctgggaagaagggcctgccttgggggctgaaggcaaatcctaactcctactgcatgtgatataaagggttacaaaattaagtataaatgcatctctctaaagtcacttttctttctgtgtgtgtatatacgaatatttgtatttatttattattcctaaaaaataattgtatttactgttgtttattgtgttgtatttattattccttgcgttttattgtattgcattttattatttatctattgtgtttattatctattgtatttattattgtatctattatatttattattcctgaaagtttgtacttattatttatatattgtatttattgtttattattgtatttagtatttattattgcattatatttattattatttattgtatttattatttctaaagagtttttaggaaactctgtatttattattcctaagataaagtttattgtatttattattcctaaatatttatacatttataatatttatatattatatattcacatatttgtaatatttatgttagttacattacatataatatttatattatatattacgtatgtataatatgtatattatatatttacatatttataatatgtatattatatatttacatatttatacaatttatatattatgtatttatatattgtatatttatatatttataatatgtaaatatttttatattatatttaggaacaataacattgcacttattattcctgaaaaagtctggggcaagattaatttgataggataaacacaagtactacaatgctgtttttttggcaccccagaactggtaggctgatccaccaatattctttagtcaaagttcttagggccttgaactggaggtaagaggataagcccaaccttaagtctcttgtattttagagcttgccatatatattgctgtgaatacgcaatatgatttaaccatagcatagcaatttaaccaaggaggttgagttgtagcaggaataagagtaataacttttgggccaagcacggtggttcacgcctgtaatcccagcactttgggaggccaaggcgggcagatcacgaggtcaggagttcgagaacagcctggccaacatggcaaaaccccatctctactaaacatacaaaaattcgccgggtatggtggtgggtgtctataatcccagctactcaggaggctgaggcaagagaatcgcttgaaccctggaggcggaggttgcggtgagccgagattgtaccattgcactctagcctgggtgacaagagcaagactgtctcaaaaagaaagaaaggaaaaaaaaaaagaataataacttttggtagagtaaataatgcctaaacctcacttattgatctcctccatgggtcaggcaccccaaggccctcacaagtcttggttgtcttaattaatttaagccacagaacttgaggttggccctgtgatcttctccatgtttagaagaagcagctgagctttctctccaaattccctagagacatgccatcacccttacatgcatacgaaatacttttgtcccttatgaaaatttcactaggaaaaattactcactacgttccttagtcatagatgtgtatgtaaaatgcatttgcggggccagtggtaactgacatagcctgtaacttaccaggtgtgagatgtataaatgaagatggccattgtctgaagtgagaagaatgggataaaaaaaagaaaacaaaaatcggagaagtcctactgaaactcagtgaaagcgtcagctacattttgcaaacttcaaggagtttctgtcaggtgctaggctgctgagaccagagtgaatttttggcttaaagcagacatacagccctctctccaggggaggcagcatggtgtgggaaagaaagtcaaggacacgctagtggaaagtcatgtcctcctctccagggtgagcatgcaggggcggcagccgttggggagatggggccagtgcctgccttgtcttaagggcctgcagacaccccagcttcagatacatgggcacagtcttggctgcacctagaagccctgggatgctgacgtgagcatttcctgggatggaggaactccttcttgaaccccctcaaacttgcagaggtgggctagacatgagtaggctgctcatgagcaccttttgtgtccgggaaccagcagtcatgaggatgctttgttgaccgtgaagacccagtgtttccagcaggcagaattctgtggcctggcctcttctccaatggccccttcaccactgtagtgagctccatctgcccttggggcccccttcctgaacaagagagatgcagctcactcacacagtgggatggggatgccctcaacttgacaggcaaaagcctgggcatgagagtgagctcagctatccagccccctgaagaaaagacagatggagcagaaaaccgtattgtcatgatatcaaggaaagagaaaaaacagaattctaaaaatatttactccaggaaacagatgtaaggttttctttccaaaatgaaaacattgaatctgcaaaccaaatggggaagagaggatgaggacaagctgtggtggaaatggagctggtagtcaggtaaagcatccaaggacacaaacatcacagcaaaatcgcagaagggtcagcgacagggagaatctgtgagaaccctgcagacagtggactcggtgacatggagcataggtttgagaggctttttcagagtgcaccaaaaacaaaacaaaacaaaacaaaacaaacgaacaaaaaaaggaccagagaagttagaagcaataatcggcagagcagcggctttgaagaaaagagattggaaatccaatcaggaggatgggtgttaatgaagaaagaacatgactaacaaggaagaaaaaatattcaaaaataaaagaggaaaacctggctgaactgaagacagatctaaatctgcaggttgaaagggtttgctagagaccaggcaaaactagtaaacatcaaaagatagtggtgacacactaatcgcttggattcatgaggaatgaatacctacaaagacataaacagcaggctgccttggttctctccctgcactccttaccgcctgccctccttggagtagggcctcaccctgccttctcagcatctcttttctttcctttccttttcttttttccttccttccttccttccttccttccttccttccttcctccctccctccctccctcccttccttccttccttcctccctccctccctcccttccttcctttcttccttccttcctctcccccctttctctctctctctttctctctctctcccttcttttctgacagagtcttgctctatcgcccaggctggagagcagtggtgcagtctcggctcactgtgcaacctctgcctcccaggttcaagtgatgctcctgcctcagcctcccgagtatctgggattacgggtgcctgccaccacacctggctaatttttgtatttttagtagagatggggttttgccatgttggccaggctggtctgaactcctgacctcaggtgatctgcccgcttggcctcccaaagtgctgggattacaggcgtgagccactgcgcctggcctctcagcatctatttctctgccttcttgatcacccctccctgcgcctcagtccatcatgggggaatcccaggtgagatgcacttgtactcctagcgttacaggaaagggatcccaatccagaccccaggagagggttcttggatctcgctcaagaaataattcaggacaagtctgtagagtaaagtgaaagcaagtttattaagaaagtaaaggaataaggaatggctactccatagacagagcagccccgagggcagctggttgcccattgtcatggttatttcctgatgttacgctaaacaaaggtggattcatgcctcccctttttagaccataaagggtaacttcctgatgttgccatggcatttgtaaactgtcatggcgctggtgggagtgtagcagtgaggacgaccagaggtcactctcgcctccatcttgattttggtgggttttggcccacttctttactggaaactgttttatcagcaaggtctttatgacctgtattttgtgctgacctcctatctcatcctgtgacttaaaatgccttaactgtttggcaatgcagcccagtagttctcagcctcattttacccagctcctattcaagatggagttgctcttgttcacacgcctctgacactagtcgtctcactgcagagctgctgagctgccttggatactgggctaatcttcagagaccagaagctggcaaggctcacaatatgagccttggctgctcacaccttcccccaagggaatccctatgtgcagatggggtttggataggcagaggggagagacccctccttctgcaaattcaggccaaagatgggtcaagccctgaagagcagaagccacataacttttgggccacactgtagacccagtgggtgaactgcttttctcagccagcaggtccactggggctcacccaggctaagctagatgccccctggcaaggttgccaactccctgacctctacctaacgacccagggaggggaatggcttgccagcccatcactcctgcagcaactgtggtgggaaggatgagaaacgtaattaaaatctcaggcatcttttcccaagggtcattccagctgaagagcctaaatatcataagggtatgaatgagctgcatttattattttcaccatggagacgtccaagaaaactgaccttttcagcttcaataaaaacggattttcctgcagatactttgacaacagctgtgatcatgagcttggctgaaacttaatattaaacaccaaagaccaggaaaaagagatgccttcccaaggcctgggagagttactgacacccgcttgcaattagacactggtatgggcatggcagcctgagcccagctcacagaggctcactcactcctctctggatccagatggctgaggaacccactcagcatcaaagccacctattatttacgcgtttagtttaaggcatgtagcacgggactcagagcaaagctgcagtagcagactgccctggaattcagcaggactaggttccggtctgcttggattcagcatcccctcctgtcatgtgaccaggagccccagacatcacactctggctcgtcttcccctaaacacagcccagagctgaccctcctgccatgacttggccatactagttggcaaaaagcttgccaacttcctgccccaccatttctactgaccatggtagccaatacccagaggaacagatgacagtcaatggcagctgctgccttgcactgaaatcaggtgttggacagtaacaaaaccttgagttccctctaaacacctgtgcctgaccccaggcattttgtcctccctgtcccaaccctgctgaaaccacctttgccaaaattatgactgagaaaattattacagtaaaagagatctgactgaaccaactccgtcttgctcctaacctccaagttgtccttgttcattcctgggcataggccgaactaactttgggaggaacttggtttacagtttaattttgaaacaaagatgataacagccttttcccaaaacaaacccccttcttgcttggggactagactgcctttgcaggactaaaaaattagccacataagattagaaattatggtgtaggagtcactgttgcaaaatctgagattggtgcttttgcagatcttctgctccagtgcaccagctgatgccacccaaatcgataaactggctcatctggtcttggggccccccacccaggagctgactcagtgcaagaggacagcctcacctcccgatgatttcatcttcaacccaaccaatcagcacttaccactttccaaccttctacccaccaagttacccttaaaaacccttgtcccccaatttctgaggagattgatttgagtaacaactctgtctcctgtgtggcgtggctggcctcttgtcagttaaactctttctttactgcaatgctgtggtctttatttgtgcagtgggcatgaagaatctctcaggtgggtacactgccaccatgaaagtgaagcaatttaaaaaggtataaaacaataaggacaaaggcaaatgaggagagagtagcaacgagagatttcaatgaatttcagaaggcagaacttggaggaaggcaatcttactaggcagagcagagaaagcacctgaggtgctttagaggagactggtgagcatgagcctgtcagagatgtttgaaccacagcaactccatcttgaatagaggctggataaaatgaggctgagacctactgggctgcattcccagattgttaaggcattctaagtcacaggatgaaataggaggtcagcacaagatacaggttataaagaccttgctgacaaaacaggttgcagtgaagaaacccaccaaaaccaagatggagacgagagtgacctctggttgtccccactgctacaatcccacaagcagcatgacagtttacaaatgccatggcaacgtctggaagttaccctctatggtccagaaaggggaggcatgaataatccacccctcgttcagcatatcatcaggaaataaccataaaaatgggcaaccagcagcccttggggctgctctatctatggagtagccattcttttattcctttactttcttaataaacttgctttcactttacagactcatcctgagttctttcttgcacaagatccaagaatcccccctctcttggagtctgaatccaaacccctttcctgtaacatgcccattaacacagaacctcaggcaagtggtggggatggattccggaagctgggactgggaatgagagtttaggaggattaaaaacaagggagttggatgacgtcacagaagagtgcagttagaagctgcaggaatctttccctccaccctaacaagttttgatctggcaagggctgtctaaagcaactattttggaactctgcagtctagttgaacacgttcggcatccaagagaaaacttaatggagaagctggtgaattttaatacatttccatgtttgcgtactggctaccatcccccacctgccagccccgtggcaaacagctgtggggacagtggcctgcattcctggtgtgacttgctggtgccagggtggggaataagaaccttatcctccaaaaattagagttgtgtgttttgattgctgatccttttgacctctgggggactggcacagagtccagccattgtttcagatcacaagagctagagcagcttttctgctgtgaggggatttaaagagacatgacttccctgttccctcccctcacctcaacaattttgggagccaaacatttaaggaaatctttgtcaggtcattgactgacagagacaacggaacaggaacttcaaggaccacatgcaataagcaatcacaatttgtaaaaataatctggaaaaaaatcacagatggatggctccatccttaacaagcaaaaatccacaatccttgaggagtgtgagagttagagttccaggattaccacaataataatcagaatgcccagtactcaacaaaaaaagtacaaaacatacaaggaaataggaaagtatgacctgttcacaggaaaagaacatttgacagaaaccatccccgaagaagaccagacataggaattactagtcaaagacattaaatcaattatcttagacacatttaatgagctaaaagaaaccatggattaaaaaaccaaaggaaattgagaaaataatgtctaaaaaatgagaatatcaataatgagaaattataagaaaggaaccaaactggtcttggaactgaaaaatacaataacttaaaatgaaaaacttactggaagcattctacagcagatttgagtaggcagaagaaaggatcggcaaacatgaagataagacaattgaaagtatccagtctgaggaacataaataaaaatgaatgaaggaaaataaatagagcctgaaggatttatgggatgtcatcaactataactatgcattataggaattacagaagaaggaagagaaaggggcagaaaaacatatttaaagaaattgtggctaaaggcttcccaaatctgatgaaagatatgatatagatactcaagaagctcaacaaactccaaacaggataaactcaagagatccatactgagacatattatactcaaattgccgaaaccaaagcaaagagagaattttgaaagcaacaagggagaagcaattcatcacgtacaaggtatcatcaaaaacttaatagctgatttctctttagaaaccctgaaggctaaaaggcagtggggtcacatatgaaagtcctggaaaaaaaactcaatcaaaaattcaacatctggcaaaactattttttaagaatgagggagaaattaagacatttcaagaaaaacaaaagctgagggagatcattacaaatagacctgccctagaaatgctaacaggctggatacacacacacacacacacacacacacacacacacacacaagacagtaacttgaagctgtaagatgaaataacactaacactggtaaaggtaactacatagataaatataaaagccaatattatttttccttggtttgtaacttcctttggtttggattggttttggtttatacttttggtttggtttgtaacttctccctttttcctacctgatttaagaaactaatgtatacaacaataattgtaagtctatgttaatgggcacataaggtataaaatgtaatctgtgacaataataatgtaaagaggagggatgaagatgtataggaacagagtatttatattctattgaaactattatccaaatttaattgttataagtttaagatgttatttgtaatctccaaggtaaccactaagagaataacctaaacacatatagaaaaggaaagaaaaatggaatcaaaatgatacactacaaaacaaatcaactaaatttttaaaaaggcagcaatgggggaattatacaacaaaaatcatgtaagacatacagaaaacaaatagctaaatggcagaagtaaatccttctttatctagaatatataaaaactcctgcaaatggacaatacaacaacgaaaatccccaaacaactcaattttaaaaatgggcaaagaatttgaatagaagtctctccaaaaaagatatacaaatagccaatacaagatgattggctaatatcattagttatatggttcagcgtccaagagtccaatatgctcaatatcattagtcattggagaaacgcaaatcaagaccacaatgagatatcacctaacaccaattagaatagctataatttacaaaaaagaaaaaaaagtttaaaagcacaccagaaaataacaagtgttgatgaggatgtagagaaattgaaaaacttgtgcatggctagtgggaatgtaaaatggtgatgccccagtggaaaacagtttggtggctcttcaaaaagttgaacatagaattattatgtgatccagcaattctgttcctaggtatatatccaagatattgaaaaacagggatgaaaatagatacttgtacacccataagcagagtgtcactggtgaagggtgttcaggttcttggcattttgaacaaagaattggacaaaatgcagaaacaaagcaaggaaagaatgaagcaatgaaagcagagatttattgaaataaaagtacactccatagagtgggagcaggcttgagcaagcagttcaagagcccccttgcagaattttctggggtttaaataccctctagagattttttttattggttacttggtttacaccctatgtaaataaagtagtggtttgcaaccagtctaattggttgcagaaggtggccaaccagaagccgaagtgaagttacaaagttacagatgaagacttggtctgtgaccagtctgattggttgcaagaggggaccaatcagaggtactttcgtctttcatctgcaatgcagaaaaggggttgggagttgcaaagggagtagccactgatccttttgttacttaaaggtagggttttcctcttgattcagttctaggaagtcagcatggatcagcctaaggttctctgcctccagactctattctcctgcctcaatagctgcatttttcaaaatagccaaaaaggtgtaaacaacccaagtgtccattaatggatgaatacattttaaaaaatgtgagatatatatatacctgcaatggagtgttattcagccccaagatgtactgaaattctgacccatgctacaacatggaaaaaccttgaaaacactatgctaaggaaaagaagccagacataaaagggaaaacattgtataattccacttgtatgaagtatctagaatggccaaataaatacagacagaaagtagaatagaggttcccaggggctggggcaggaaggtatggggtgttatttcttaataggtacagagtttctgttttggatgatgaaaaatttctggaagtagatagtggtaatggttacaaaacattgtgaatgtacatactgccactgaattgtacacctaaaaagggttaaaattggcaaattttatgttacatatattttaccaaaaaatttcaaaaccagaggaattggtgaaaaagctgtaaattgagcttctgaaatgccagagtctctctccttgctcaatatccaggagatgagaggctggagtttcattttattaggaaattgaaccaaggagttgaattttagggcatcaggcataagagatgtctggggaacagtgtggattgctaggcctccttcactcaccagatatggcatttccccagtcacataccacccacccaccaccaccaacccccacacacaccacagcacattccacacaccatgcaaacacactccatgttcctggctagaatatcagcaggttctttctggaataactgggctgtcactgagagaagaaccccacacattgcatatgtagtctgtccagtaaaaagaccagcctgttgcttgctcagcctcccaggagtcccgaaagagaagaaatgtagaaggctcagtctgcctggtcaacagcagtccacaaaagacaacagaaaaaacaaatgggaggaaattgtaaaaatactataaggcagtttcccatggttgagggacataattctcttcagttaaaaagcccaccaattgtccagcacaagaaatgaagtaagtttacttcagggttcatcaaggtcaatttttaagtgacagagataggaagaactaaatgttttcaatgagaaaaaaagtatagagcctgtgatgtgcccctctgataccccttcaggaaaacatgtgttgtcccagatgtcagcaggtggcttccagatctcagcccttcaggggtctctacgtgttacagagaggcacctcgccccaggtcatgcctaggtgatccatatccgatggctgttagatgttggagcataaaagtgaggatatctttgttcagttcaggaccctctgaaaagttattcctgctccagagctcccctggggtcaaggaaggctatctcaagcctgaagtgcagtacaacttctccttctgcctaaacctgcctcctttctctctcttttataaatgttaaccacaggagaatctttagtaaacatcctgcatgctaagtctgcttccaagggagcccagcctgcaacagatgtcatacacagaactgggaattagaatggcatctgactcctcaacaacaacactaaaaactagaacacaatggagcaatgcttttaaaattctgagggaaaaatattttcaagctaaaattctatacccagctaaactatcaatcaagaatcagcgcagaataaaggcattttcagaccttcaagtactaaaaatatttactttccaaatccatttcttagggagctgaagaacagggatctgaagaacaagctccaggaaaatgagaaagaacaaaaaatggtgtcatgagaccaggaaaaagaagatcccacacaggagaaaagcgaagcctgctcataaggtggaagcttcacagcagattgcagcaagaggtagaaggttccaggagggaaatcctcaggagtgaaacagagctaatgggttagagcagaagcccccaatttttcttggtccatgacttccttgatgtcttagtaattttttgtagagatggggtctcactacaaaatgttgcccaggctggtcttgaactcctggcctcaagcaatcctcccaccttggcctcccaaagtgctgggattacaggcatgagccattgtgcctggctacttgtttttattttttgtagtgacgggatctcgttatgttgcccaggctggcctcaaactcctggcctcaagtgatcttcccacctcagcttcccaaagcgctgggattacaggcatgagccaccacacctggcctgatggtttagtaatttttgtattgctgtcttcaggctaaaagaaatatctaacagttctgtttattaaatagttagatccaaacaatttaataaatatttatgccctaacagcttagtagccattaaaaaaatattatgcataaatggaaagaaaaataatatttttatttttattttattcttacataaccacaattacttcctgatgggatgtgtctgccttttggacactgcagtttctcaaacctttgcatcaaattgtgcacctgtagcttcattttctgcttcactatgacatttgcccaatactcacttgttatcatagtaactgctgaaacccaactttgcaaagatatagcattattgtaagaaatgtagttcaggggccaggcgcagtggctcacacctataattccagcactttgggaggcaaaggcagatggatcgcttgagcccaggagtttgagaccagcctgggcaatatggtgaaaccccatctctacaaaatacaaaaaacaaaacaaacaaacaaacaaaaaaacacaaagccgggcatggttgtgtgcctttagccccagctgctcgagaggctaagatgggatctcttgagcctagggaagtcaaggctgcagtgagccatgatggtaccactgcactccagcctgggtgacagagggagaccttgtatgaaaaaggagaaaaaaaaaaagagctgtagttcactctaacattagaacagttaactaatagtttgtgatacctaacaaatattgactatcatttggaaaattcaaaagatcctatggtacatctgtgctatgcagtgaatgaactatgatatcctggaactgacttggtacattttgggaattgtgatattagagtatgtcaaaatatagttaatagacttttggctgacattttgaaacatatggaaaaaactaatgataggtatatggaaaaccagacaaataggctgggcgcagtggctcatgcctttaatcccagtgctttgggaggccaaggcaggaggatcacttgagcccaggagttcaagaccaacctgggcaatatagtgagattccatctctacaaaaaattttaaaattgcctgggtgtggtggtgcccgcctatagccccagctacttgggaggctgaggtgggaggattgcttgaccctgggaggtctaggctgcagtgacctgatcgtcactgcatttcagcctcagcagcagagcgagaccttgtctctgaaacacacacacaaaaaatgaaaaccaggctataaaaaagtgaagcaattattgactctagaaacaaggttggacaaaaaatgagacgagatgatatacttcttgacttaacaataaacaatatttgcatgatcataataacatgaacactgaccacagttttaaccaagagtgtgctggggttggtagacaaaagtaaaaacaagctagaaacttgttcacactgtggaacagcaacatagaaaacgacaaaaccaaagaatgaagatagggccgtgtaaacgtgggatttggaaacacagaggcagataccaaggaagcagctataagaggtaaaagtgtcaccaggagaaagattggggtatagggaagtaaaactattgcccttattctaagtcttttggtaatatttgacttctcaaacaatgtgcatgcattgctttgataaccacatttaaaaattaagccaaacaatgttaaaacctaacaaatataacccggctgccccttctaatctacgtaatatttcacatgcaaccgaaagtctcagagctctcccgaggtttctgcaaacctgagcctgagagtggagggatgaattatattctcacagtgctgccagcccggctgatgcctctgtgggattcttgtcctctgcaaagtatggggcctctgtgatttactcatcacacttcacctgccctggcctctccaaatcagctaaaaagagacagctgaggcccaagaggttgggggcctctgcagaggggttccttattaggcacccctttttcttcacatcaggcttagactcccacctctgtctgaggcctctgattcctgtccctgtcccagagagaccctaggagtgacctgcatttactctcacagttggctccaggcctgacacctgcccccgcccccaccaccacacacacacacacacacacacacacacacacacggcaggagggacagcagcaggagcagagcaaatggcacactctcttagaagaacagcagagaccctcatctttccttcaccaggcttcatctttccagaaaagagtggtggatttaagtagcaatttccccctccattacatagtattaccccccaccccatattgacaagcacaggaatcacagtgactgtgcaccgtgaccgccacacagcagtctgaggatgtgatgaccacagagctccttcttggggactggcgtttcccatgctctgcatgtgtgtgtgtgtgtgtgtgtgtgtgtgcacatgcaatgtggccaggccgccatgtgtctcagcagaatggtaagacgagtgaataaggcattgatccctgtgagcccaaagaacgcacgtgttagtctcttagtagcaagcctgtgagcaactgttctcaggtgtcaggagttgtgcctcactcatccagaataactgagagaggactttgggtccctttacagcccccgaggagggtccctttcccaggcaggccaaggaccccagtttgaagaagcttgcctgccctgcaactttattctaaaccctcagacagcaggttctgcattcttccccatcttccctgcagcatttaccaccgcctgagggaggggggtatcctgagcctactccctctttgtggggtgacacctgtctgcacagatattccagggggaggctacctgatggcgaccctctgaccctcaagctggctggtgtgaggatgaagctgcaggtctcgcttctcctctggggagagctggctgggctccccacgatggggcagcttgcagggaaaggggctcagtgcacctggccacccccttgcctatgggctgcatgttgaagatgtatattgaagctgcataaatggcttgtatttaagtaatccttttgactctgccctgggagtggggctgcaaagaggaggttgtggaaagtgcaagggaaaggtccagacctccagcaatggcaatgaagggcgcattctgggtcgagcatgccccagggggctactccctgtaactgctggcccggccccatggcctcagcaccccaggcccagtgtggacataatggcccttcctttagtgccccacaggacaatatccaggataatggaaggggacaaaagccagagcatcccagacacctaagactccttctctgggcctggtgggcatgggctgcagctcctcgggatcccatcctcaggaggtcccctctcaaggctctgccttcttcaaaacctgcctgacacccccaggcatgtgcaaccttctccacctgccccagttgctgaatgaggccctggcagtcactggaaatattcttcacttccagtaagacttccccaccatgctccacctcaccaagaccccttctagaaaacccggctgctacaggccctgaaaaggggagccaggagtgattgagggtggaacgccaagtgtcactacatccgaaattcagatagtcctcctgcagcaagtcaacttgcagacgtcatcaggaacccagcccagccaggtgcagtggctcatgcctgtaatcccagctcttggggaggctgaggcgggaggattgcttgaggtcaggaatttaagaccatcctgggcaacatagtgaaacccccatctctacaataaaataaaataaaataaaattaaattaaaatcagctatgtgtaatggtgtgcatctgtagcccagctacttgacaggctaaggagggaggatcgcttaagcacagaaggtcgaggctgcagtgagctacaacggcactactgcaccccagccttggtgacagagcaagacactatctctaaaaaagtaataataggtagggtatggtggctcatacctgtaatcccagaactttgggaggccgaggcaggtggatcacttgaggccaggagctcaagaccagcctggccaacatggtgaagccctgtctctattaaaaatacaaaaattagcagggcatggtggtgggcgcctataatccagctattcgggaggctgaggcaggagaatcacttgaacccaggagatggaggctgcagtgagctgagattgtgccactgtactccagcctggacaacagagcgagactctgtctcaaaaaaaaaaaagtaataataataaaattttaaaatacaaaagaaaccaggggcatgtggctggtgtccagtctttcctgttctcccaccggaggcgggaccgggctctggacatgcctgagctggtttactgattgctctcctgagctgcatgcaatgggctattctcatcctcttcccagaaaaccccctcccttgactcccaagtccatgcccctctccacccccttgtgcttgggacctgagcttgaactccaaatgcagcagctatgactgcttaagcaggtcctcccgaggagcagggctgctgggggcacacacactgtcctgaggacatgctctgcagccattgaaactgttagtgtctgccagtcaggaaactctcaccttctgcaaggcagtctggctctccatggcctccgagtcaccgcagccctggatcaataccagtgtaaacagagcttcgctgtgagttgttagttgtctttcctggtctggggcgtaattcatactgttggctcctggcacctggctcgccaggggctggcaggggtgctggggagaggggtgtgtggtcagggtgagagcacagtgccctggagggcagttccgggagaacagtgaggacatctccaacaaggggctgggggacaaacacaccctctcccgcagcacaggggactggactctccccagatctcctgtgcagctgagctgcccacatgtctctgtctgtccagcttgctgaggacaatgtgttaagaaccgtctgctcagctcataaagaggcttggcccttccgccccggctctggttgggggtgtttcagggaaacaggctttccagggatgcttcggcatggccgtgccgtatcctggcaaccagacccaaagccacatcctcttgagaggactgggcagggtggggaagtggccactgcgtggggctacccccattgtccactccacccttagctggctctatgcataccctgagctgtgcaggagtcacagctctccctgagtgccacaccctgtcccaagatggcctgcagggcattcagaggtgctattttccaccatggtctccctgggctcctgggaaactccttggccataacctcagttttctcatctgcaaagtgaggtgggctgggagccaccactccctacgataatcccagtgctttgagaagcggaggtggttggatggcttcaggctaggagttcaagaccagcctgggcaacatagccagaccctgtcttaaacaaacaaacaaacaaacaaacaaacaaaacttaaatgggtgtggatgatactgtctttcacagacccagcgctccccagctgcccatgcacctctgccactcctccttcctggataattgatttcaaagcaatggcagttgaggtgactgggctggggtctgtgccgtgcagccctctagacacaaactccctgcccttgaggcacctccttatctccaagcccagccaggtctagtcatcctgggctcctcgctctgtttccccttatccaggagctagaaaaagactcgtggcatactccccgccacccatagcctgctcaatccacagaggtacagatgatccaccaaagtccgcctcattcaggcctgctgactaccttgtcaaaccacatctcctcctacagcagaactgtggggagacaggccccaggctggagtgccccccagccagggcctcaccttcaacctttaatgctccccttgccaggtttctgaacatatctgcaatgacctgaatgtgtctcccaaaaagcaaaatgttggaaacttgatcctcaatctaagtgttgagaggtgaggcccaaagagaggtgataaggccatgatggcagagtcaaaggactaacactgttatcgaagaagtgggtttgtcacacagggggaatctggccctctcttactctcactgtctccccctctcaccctctctttgccctttagccatattgtgaagcagcaagaaggctcttatgagatgctgaccttgttgatcttgaacttcccagccttcagaaccacgaaccaataaattcctgttcattataaattacccagtctgtggtattctgttacagcaacacaaaatggactaagacagtcttctctgctgtctctcccataggcagttctgccagatcccccaaagcccaccaatcccctcaccccagggctccagaagaggttatgtcctctttggaggtggacccatcctgatggccttggacctgtggctccctgggcctcccatcagcccctctatttggagagtcactgcagccaggagccccaagaagggacttctcaattccccaatagtggacactgtgttgctccacccagatctcctctccaggggctgatgccactatgctggtcggggttctccaaggagacagagccaacagatagatagatgatgatagatagatgatagatagatagatagatagatagatagatagatagatagatagataaacacacatgagagagagagagagataacagaagtcaggcacagtggctcacacttataatcccagcactttggaaggccaaagtgggagaatcgtttgagcccaggttcaagaccagcctgggcaacacagtgagacccccatctctacaaaagatctgtatgtatgtacgtatgtatctattatctacatgagattttttaggggaattgtctcgtggttatggaggctgaggtttcccatcctcagccacctgccagctggagacccgggtatgttgggagtgtgactcactccaagtctgaaagcctcagaaccaggaaagctggtggtataactctcagtccgaggctgaaggtctgagaacctgggctgggggccactggtgcaagtcctacagttcaaagcctggagaacctggagttctgatgtctcagggcaggacagtagggatgtgtctgctccaggaaagagagtgaattcacctttcctctgccttttcgtgctatccaggcccccagccaattggtggtacccacccacattgagggcggatcttcccaactcagtccattgactcacataccagtctcctctggaaacaccctctcagacacaaccagaaataatgctctcccagccgtctaggtgtcccttaatccagacaagttgatgcctaaaattaaccatcatggccattatccccatgggagctgggaatatccctgccttcttccctgggaattcccttggcacccgggaagcacctttcctaagtttatgcctcctgtggggtgatcctgtatccagcgactggctgatgtgggagtacaaagccctgcccctcacctcagtttggggcaactctgaaggcgtgtccagctccagggctcccccaggcctggctgaggcctagctgtaactgcactggggggtcgccttccctctctgcccaccctcgccctccccgcttccctatagggggtctctcctgagagccatcagtgtaaacctcctgccccaaactctccacctcagctgcttccagagaactcagcctaagatgcctttgggctctggggccaggtggctgtgagcacagggggcacgggcttgcatcctcttggaattttcactgcaaactcagagtcctgactttcacaggtctggccgtctcatgggtctggccccataggccttccctagctcagcccttgggcagcagactccctttgtaatagacactgtggctcctcttcgatgccctgttccatactgggcacctctgccctggattccaccatctgtacctgccactcctcagaagatcacccagggttagggagctgccctgcccacaggtgcagagagtcttaagttcctggaagctgatgagagcctgggcagtgcttagtcaatgactgacaggtgcaggagtaggaaagcccagctccattgcctcaaggtgaggacagccggactttgcctgagatcccaatcttgattgacttcttactcttccctggcctgatcccccctacctttctagcatcagggactagtttcatggaagacaatttttccgtggatggtgggggaggggagatcagggatggattggggataagtctgtttcaccttagatcctcaggcattagttagattcttataagaagcatgcagcctagatccctcacatgcacagttcacaaaagagttcacactcctatgagaatctaatgccaccgctgatttgacaggaggcagagctcaggcaataatgttcactcacctgccactcacctcctgctgaggccatgaaccagtactagtccatggcctggggcttaagaacccctgctttataactcatttgcccatgaatgtcgatctcaggcttctctagggaaccccacccaagacacttctctcaacaagagaaaaaaatggagtccagacagcgccaacatatatacacacattcaagcctggggggcttgcatcttgtagtttgcatgtttatttcaggccgggaaggactttctcccacccaaggatccgccatgtgagaatcactcatccgcatttccttccattatttttgagagcttcatttgttatgattaaagctttaatccactattggaatttattttggtgcatggtgttgagaaggaaaccaatttaatatttttcataaaacagttaactaatgatcacagcaccatttatttatttatgtagtttttaaattaaaaatgaattagaacatgaaatgatctccaagatattattaagtaaaaggaaaaacaaagtgcaggatagtgtgtataataagctcttatttatttatttattaaatacataaaaggaggctgagcgcggtgactcatgcctgtaaccccagcactttaccaagggggaatattgcttgaacccaggagttcaagaccagcctgggcaacctagtgagactcccatctctaaaaaattaaaaattaaaaaaattaaggttgaccgggcacggtggctcacgcctgtaatcccagcactttgggaggccgaggtgggcggatctcaagatcaggagattgagactatcctggagaacatggtgaaaccctgtctctactaaaaatacaaaaaaacttagccaggcgtggtggcaggcacatgtagtcccagctactcgggaggctgaggcaggagaatggcgtgaacctggcaggtgaagcttgcagtgagccgagatcacgccactgcactccagcctgggcgacatagtgagactctgtctcaaaaaaaaaaaaaaaaaaaaattaaagttgtacatgtctgtagtcccagctactagggagactgagacaggagggttgattaagcctgggaactcgaggctgcagtgagccatgatcatgccactgcactcactccagcctgggtgacagagtgagaccctgtctcaaaacaaaacaaaataaaacatacatataaggccatctataggcatggacagtttctataaggttttgtagaaactgttgatagtggttgcctcccgatagagggccagggctctgaagtggaaaggagaactacttctcactgagtattctgtgatccatttgaattttttgtcatattcggtcattagctttttagtaaaatttaagcgaattttaaaaatttaagactctgtgggttgcaagtaacaaaatgtaactgaagctaacttgaacataaagggacacatgttttgaaggatgcagtgatcaccctggagccctaagccaggagggcagccagtgtggagatgcgtggaatgaaggatgctaataggataccccctcctgcctgtccagctgttcccaccctacatcagaggacttctctcccagcagaaagtgcctgaaacccacctgaccctgcccactctcgccaggcagggataaggttcgtcttcttagagcatacttcttttttagagaaagcaggccactccactctatctgcctgccttcctcgttgtgccacccataggctgaatgataatgaaatcttccccaacacaccccatggatggtagccaatttcatttagaagagagaacatgttaagagccttctagaatagaacttcaccctacttggttgccagtccaaagcagataccatttcttccttcctggagagaataaggcagtgatggttccagtgaattcttaccttccataattctttggtggcttgtttccatgaccagcagtcaccccagggtttgcttgtaatggggggaattccctatccagtgtcctgtggggacacccagaaaggagcaccgtgggggatcccctgaaagggctgacggccgtgatgatttactcccacttagagcctgaacacaaaactgtggctttcttgagggactgagaatcacaagccccctgttggccagattttcttttttctggtactacatctcttataaaatcctgagctgtctaactatagggatttcctatagccttactctctattggtccctactcttacagccaagagccaataagcccatcaattacatttctaatatataaatgtgaaaggaaaataaatcttggaaccccaaaatcactaagctaaaggaaaaagtcaagctgggaacttctcatggcaaacctgcctccctttctattcaatgatctaaatgtgtctcccaaaaagcaagatgttggaaacttgatccccagtgcaagtgttcagaggtggggcccaaaaggagaattgataaggccatgatggcagagtcaacggattaatgctgttattaatgtgagcacccctctgtgcactgagatgatgcatatctgattgccttcttcagagaggctaatcagaaactcgaaagaatgcaaccatttgtctcttatctacctatgatctggaagccccctccccactttgagttgttctgcctttgcttcgagttgtcccacctttctggaccaaaccagtgttcatcttacatatgtcaactggggtctcatgtctccctaaaatgtataaaaccaaactgtgctctgaccaccttgggcacgtgttgtcaggacctcctgaggctgtgtcacagatgcacgtcctcaaccttggcaaaataaactttccaaattaactgagacctgactcagatatttggggttcacataaccaggggagatatttctcagtgttcaatgggacaccttcactattgacttatttccttactcccatcctgtctcagtaagtctttgagggaggaacagtttactcataaccccacttctggtaccaaagttgatctttgttaatattcttctgattatttcattcgactagaataggcttagacacaaacatgttgttgttgtattttaaagtatgcagaatctgtggacaggaatccagccaggtttcaggaaaatctgtgactcagcctggactcccattaccacatgactgagaacatggctggcccctttcttgactatttaaatcactggtttagccacaggaagggctgactttcccagctctattccaaaattctggtcaggggaatctctgttggccaagtttgggataatgactactcttggttcaaacttcataggccaggatggaggtagggttagggttggggagcaggtaggatgatattgtacggaatggacaccagcacaattgtcaaaataaggggctgggattagagacttgtttgaacagagaagacatctccaaaaggtaaacaaaaacctaaagatatacaggcacacctcattttattgcatttcactttattatgcttcacatacattgcattttttacaaattgaagatttgtggcaaccctgtgttgagcaagtatattggtgtcattttttccagtcacatgtgctgactttttgtctctgtgtcacattttggtaattcttgcaatatttctaactttttcattattattgtatctgttatggtgatctgtgatcagtgatttttgatgttactatgtacatgtacatagtatgtacatggtaactatgtacatattactatgtgtacatacatgaccctataagacagtaaacttaattgataaatgttgtgtgtattctgactgttccaccaactgaccattctcccctctctcttcctctcctcaggcctccctatgtcctgagacacaacaatattgaagttaggccagttaacaaccctacaatggcccctaagtgttcaagtagaaaaaagagttgaatatctctcacttcaaattaaaagctagaaatgattaaccttagtgaagaaggcatgtcagaagccaagatgggccaaaatctaggcctcttgtgccaaacagctggccaagctgtgaatgcaaaggaaaggcgcttgaaggtcattaaaagtgctactccagtgaatgtctgaatgataagaaatctaaacagcctattggtggtatggagaacgttcgagtggtctggatagaagatcaaaccagtcacaacattcttttaagccaaagcctaatccagagcaaggccataactctctttaatcctgtgaaggctgagagaggtgaagaagctgcagaagaaaagttggaagctagcagaggttggttcatggggcttaaggaaagaagctgtctccataatataaaagtgcaaggtgaagcagcacatgctgatggagaagctgcgtcaagctatccagaagatctatctaagatcattgatgaaggtggctacactcaacaacagattttcagtgtagacaaaatagccacctattggaagaagatgccatctaggactttcagagcttgagaggagaagtcaatgcctgacttcaaagcttcaaaggacagactaactctcttgttaggggctaaggcagctagtgaccttaagttgaagctaatactcatttaccgttctgaaaatcctagggcccgtaagaactaagctaaatctaccctgcctatgctctgtaaatggaacaacaaagcctggatgacatgtgtttatagcatggtttactgaatatatatatatacacatatatatatttttttatagtctggaggtcttttttttttttttttttaacaagtattatgccatgagttcatacggaataggttccagcagctcaggctccttctcattggttctcacaaagtgtgcttctctgggtggagcaggctggcacttcagttgaacccaggtacctttctctttggcttctttctttttctgatcattttccttcatgtatttcaggaagctatcccagctctcagagtgcttaatgtgctcaatacgcacattaattctcttggcaagaatcttgctcttaacttgtttgtttacaacaatgccaacagcatgctgggtaacattgtagactcttccagttttaccatggtgacacttgtgaggcattcctttttgaacagtgcccattcccttgatgtctacaataacacctttcttatagattcgcatatacgtggccaaaggaacaactccatgttttctaaaaggcctagagaacgtatatcgggtgcctctcctctttccctttgtcttcgtcattttggcaaattactggaagatggcagttccggctgaaagggtggtttactgaatattttaaacccactgttgagacctactgctcagaaaagaagattcctttcaaaatattactgctcattgacaatgaacctggtcacccaagaactctgatgcagatgtacaatggattaatattgttttcatgcctgtgtaggggagtcagagatcaccttcaacactcccttgagcacttatgtgggctgttcggctggatctagaaaccaatgcacacccaggtaaatgaacaagagaaaagcatatgaatgttatgagttttacatgtacatggggatcttcacaagagagtgaagtctgaagaagtggccaaagcaagatcttttcatactttttagataaagaacaatgaatttgagaagaaataacaggacaaagaaaatttggcaggggcagtaaattttctaggggtcactagaagatatggagagggaaactagtggaagataacagttactttgttaaatctatttattcaggtccattgtagccaccaaatcccagtctctgttgatcagagctgttttcttgccctggtataggtgagggtaccagtctccaagaggaatctttatggcttgctgaatgcagaaagaggtcagctagccctttctgcaatcataatttctttgatgttcccaaaataatcaatataccaagatatgattggtataataatcattataccaatcaataatcaatattttgagatggcacgtcctttgctccttcatctactaacacaacatccattctgcagcccatggatcaaggagtaattttggtttttaagtctcattatttaagagccatgtgttgtaaagatacagctgtcacagggagtggttcctctaatagatctgggcaaagtgaactgtaaaccttttggaaagaattcaccagtctagatgccagtaagaatatttgtgatttatgagacggaggtcaaaatagcaacatcaacggaagtttggaaaaagttgattccaatcctcatggatgaatttgaggggttcaagacctcagtagagacaataactgttggtggggtggaaatagtaagagaactagaatgagaaatgaagcctgaagatgtgactgaattgcttcaaccttgtgatcaaacttttacagatgaggagttgcttcttatgcatgacagaagaaaaagtggtcacttaaatctactcctggcgaagatgctgtaaacattgttgaaacgacataaaggatttagaatattgcataaacatagttgataaaagcagtggcagggtttgagaggattgactataattttgaaagaagttctactgtgggtaaaatgctatcacacagtattgcaggctgcagaggaatctttcatgaaagaaagagtcaatcgatgcatcatatttcattttgtcttattttaagaaagtgccacagccaccccagtcttcagcaaccttgaccctgatcagtcagcagctatcatcaacattgagccaagaccctctaccagcaaaaagattacagctagctgaaggctcagatgatcattagcatttttaagcagtaaagtatttttaagttaaagtatatgtatttttttagacataatgctattgcacacaatagactgcagtatcatgtaaatatagcttttatatgtgctgggaagcaaaaaaattcatgtgacttgcttcattgcaatatgtgctttattaagttggtctggaagtgaacctgcaatatttctgaggtatggttgtataagatgtattttctttttttttgagacggagtgtcgctgtgttgcctaggctggagtgcagtggtgcgatctcggctcactgcaagctccgcctcctggattcatgccattctcctgcctcagcctcccgagtagctgagactacaggcgcctgccaccacgcctggctaacttttttgtgtttttagtagagactgggtttcaccgtgtttgccaggatggcctcgatctcctgacctcgtgatccgcccgcctcagcctcccaaagtgctgggatgacaagcatgagccactgcgcctgaccaagatgtattttctatttcaagagaaatgtctgtagatgacagaaaaatcagattcaagaaaacaggaaatacccttgataccacctgctcagacaattactattaataccttggttttggggtggttttttgttttagtttttagagatggggtatcgctatgttgcgtaggctggacttgaacttgttgttcaaccctcccgttccctcctccacgtcatccttgggtacacgtcctaacagtcttttttccccattttttttttttttgagacagagtttcactctttttgcccaggctggagtgcaatggcgcaatctcagctcactgaaacctccgcctcccgggttcaagcaagtctcctgcctcagcctcccgagtagctgggattacaggcatgctcatgcgccaccaccccagctaattttgtatttttagtagagacagagtttctccatgttggtcaggctggtcttgaactcccgacctcaggtgatccacctgccttggcctcccaaagtgctgggattacaggcgtaagccaccgcacccggctgtgtccccctgtttttgtaataaattttacatatatgtggcggccaaatataaatgctcaccttgctttattagagactggaaactatttgatctttcttctcttttttgttgctttagagagacagaatacaaatatctcctctctcctcctgggaagctttgcaaaattaagcccttcctgccctggagagaaaagggtaatcaggtttttggttcttaaatgatagactgaatggctcatccaatcaggcatattgtgaaagaacaagagaagatgagcagtttgttggcatttgaggtgtgcaataaataatactgttccctccccaccacgttttgaactgattgaaaaataaaatacagtaatcagacagatggagatgaaattgtcagcactgatgaggctaacaggatctgcagccctgttgcctgttgggcttcctaatacacacataaggaaatatacatataaatatatttattatatataataaatatttatatattatatataagtatatattttaattatgtataataatatatagcaacatatatgtaataaatgataaacatatactttatatcatatataaacttatatatgaagtttattattatgtgtatatattatatatgaagtttataatatatgtttgtcatgtatacctatgaagtttattattatatgtaataaaaatatctattttattatacaggcagagtctcactctgtgtccaaggttaagtgcatggtgtgatcatagctcactgcagccttgacctcctgggctcaagccttcttcccatctcaggctcttgagtagctggtgctacaggcatgcagcaccacactcagctaattagaaacaaatattttgtagacacaagatctcactatgttgctcaggctagtctcaaactcttggtctcaagtgatctccccacctcccaaagtgttgggattacaggcctgagccactgtacctggcctggacttcctaatattataccccaccaccaactccttcctcaccagctgggacaatggttagtgacagccccctgcatacacatctgcaaaaatgggtcgtaccatattcactttgctctgaaacctgctctgttccttatcaataccttttactttatggatctccattaactgggatcttagttgttataacttcggactttttatagagagtgctgtaatgaacatctttattcatacattgtttttaatctatttgatgatttccttatgataaattccaagaagcggctcacattgcaactgtgtacatatattgccacattggtatcaggaagatggtaataattcagaatttagctaacagtgtttgaaagttcttgtttttccacatgctcataggcattggcaatcctcctttttaactctttgcaaatatgatagaccaaaacattgttttaatatacgtttctgttggtcactgaagttgaatgtcttttaatgtttattgcatatcccctcttttggaattgattgcctttgtcttttcatcttcttttattgattattaagagctctttatatgttaagaatgaaaccacctttgcaaaaattatgacagtgagaaaaatctggcatagcttactccatcttgcttctagcctcgaagttgtacctattcattcctggacacatgccaagctaactatagaaggcagttagtttacagtttaactttgaaacaaagacgattacagccccttcctaaaaccagcatctccttgctttgggaccaagattgcctttgtaaaactaacagattagccacaaggttaacatatggctaagagacatgtagccaggggccacaagattcctaaccttcccaattgcccctagagattgcatctattgtaaaacctaaggttggtgtttgaggtatttcccagaccctgcattctgatagaccagcttccaccacccagactggtaaccataccaagaaactgagtcaactgaagtcaacaatcattcaaccccatatgatttcatccctgaccctaccaatcagcattccccattcctctggctccttgccaccaaactatccttgaaaaaccctagcttctgaatttccagggaggcttatttgagtaataaactcccatccttccacttggctggccctgcaattattaaactctttctgtactgcaataccgctgtctcagtgaattggctttgtctgccacaggcaagaataacccattgggcaattacaaggacaatgatcttcttctcatcgtaatatgagcaaatatatataagcataatatgagcaaatacaaaaatgtgagtattgcaaatgactctctacatacactgtcttggtaaaattttgttttctggttttatggatgatatataggaatcacctggaaaattttcaacatacacaagctggctaaatttactaaatatttagtatattccagacactcctctaattgtctcacatacattaatttatcaaattctttaatcctcacagcaatagctctgacctgggcactgagaggttaaataactgcccaaaggcacacaatcagtaaatgggatccaaacttattgactggccacagaatccttgttctaactctgtcctaatgccacatgtattgagttgaaacactggagagtctgcaaagtttccttgggatgaagctggtatgtgcatgttaaaaaactcttcaggcaggctggacgcggtggctcacgcttgtaatcctagcactttgggaggccaaggcaggtggatcatgaggtcaagagatcgagaccatcctgaccaacgtagtgaaacctcgtctctactaaaaatacaagaattagctgggcgtgggggcacgcccctctagtcccagctacttgggaggctgaggcaggagaatcacttgaacccgggaggtggaggttgcagtgagccgagatcgcgccactgcactccagtctggcaacagagagagactcgtctcaaaaacaaacaaacaaaaaaacaaaaacaaaaaaaactctccaggcggttttgacatgcccccaggatgagtaccactgattagtagtgttttgtttgtattttgcctaacagaagttttaaatttttaatgtagtcagatttgtcctatttctgtcattttattctttagtactgcaataagaaaagagtcttcctcagcccaaatgcatcagttatctattgctgcacaacaatctgctctcaaaacatagtggcttaaaacaatagcagtatactacttgtttcaattatctggatggcatttaggtggagctcagctgggtggttttcctgctggtctcacctgggatcacttacacaactaaagctgacagctggttctggctttgggttggggcatgaaggagttccggaaattccaccccaaaataagccattttgaacttcaaactgagggcacttggggaagagcaaatgcaggaaggagattcctctgagcttcccttatctgcctgaagacagagccttctaaaggaactcagttgtcatgaatttcctccccaggaatctcatcagtcaaggctgtttaactcagatcacaggagaggaagctggaggtcaacaatatgtcaacactttgtcccaggctatcacttgttcttctgaagggtcatccatcattccccaaaaatcacttactctcccctaagctgcctacatcccctctttcctatggtgagggtatatatgtttctagatctcactgggttggagaatattcatttttccttcctgcaatgctcccatgcatgtaataaattgatatacctttttttcctattaatttgaccactgtcagtttatttcacagacacaattactgaatcctcaggaagtagaggcatgtttttctctcccctataggcacctcggttctgcaccacatggcttctcatcctctaagaggctagattggcctctttgtgtcgtggtggtctcagggctccaagagcgccaggtggaagttgcaacatctcttaaggtagaggctccggagctaacatgatattgcttctcctgcactatattggtcaaagcaggtcatgaggccagcctagatccaagggatgatatctttgttgacttcacttcttgatggaaagaacaacaaagccacattgcaaaggggagtgggcatggggaggcgtgactcattggatgccactcttgtaacaatctaacacaccaagatgttaaattcactcttctatgaagtcttctagtaccttttttttttttttttttttgacagaggtttgctcttgtcgcccaggctggagtgcaatggctcactgcaacctcctcctcccgggttcaggtgattctcctgccttagcctcccaagtagctgggattacaggcatgtgccaccacacctggctaattttttgtatttttagtagagacaggttttcaccatgttggccaggctgtttttgaactcctgacctcaggcgatccacccgccttggcctcccaaagtgcagggattacaggcgtgagccaccgagccctgccctactacctttttttaaggtaaaatttacataatgtaaaattaaccattaaccactttaaagggtataatttaaagagatgatccacatcatctctatctagttccaggacaattttatcaccccagagggaaaatccatacccattaggcagtcactccccattctcccctccttgctgcctcagcccctggcaaccaccagtctgttttgtttctctatggaaatcatacaacatgtggccttttgggtctggcttctttcacttgccatcatgcttccaagatttatccatgttgaagaaggtatcggtgcttcattcctttttatggctgaataatattccaccatatggatataagacagtttgcttggctattcatctgttggatatctgagttgcttctaccttttggctatcatgaatatcaccactctgagtatccagtactctcttgattcttcttaagttgaaatcatttccacatctgagattcaattttgtatgtggtttgaggtaggaaatttcacttcatttcttccacttattcctatgtattttatacactattcttcttatactgactttatcttcctcttttgttaaataacagtgtgtgcccttgagcaggttttaattttttattgtttattttttgagacagtctcactttgtcacccaggctagagggcagtgacacgatctcagctcactgcaacctctgcctcccaggttcaagtgattctcctgcctcagcctccaagtagctaggattacaggcatgcaccaccacacctaatatttgtatttttagtagagatggggttttgctatgttggccaggctggtctcgaactcctgacctcaggtgatccacccgcctcggcctcccaaagtactgggattacaggcatgaaccaccgtgcccagtcttgagcaggtttttaaaaggatttttttagagatggaatcttgctttgtcacccaggctgcagtgcagtggcacaatcatagcttactgcaaacttgacctcccaggctcaagtgatcctcctgcctcagcctcctgagtagcttggattacaggcgcaaggtatcacccctgacttgggcaaattatttaccttttttgtgctttaatttcctcatctataaacttgggatagtaatggtaacctacatagggttgatgtcaggattaaatgaattaatacgtgtaaagtgtttagaacagggtatagtccatagcaggtgccaagtaaatacctattatttaattccaaatttctacatatgaaaggatctactttctgttctgttgtcttacttatctatttcaacttttaatcagcatcccaagtctacttttattgttctttttcaaatcattttttagttcatcttggtcctttggaattcttcccattgaattttatcaagttctccctaaatcctgctgagaactttattggagttacatttacagattaatttaggaggaattgaaatattgttactaccaagtattcttatgccataacacatctcttcatttattaagctcttattttatctcccatgatagagttttatagatttttaaattttataaaggtgttgcaaatttcttttcctggatattcttttctgggatattttatatttttgttgttatgctgaatctttttaccccattatatttatttttatttatttgttatttttaaaaatattttttattatatagagacagggtcttgcttattgcccaggctgttcttgaactcctggcctcaagccattcttccaccttggcctctcaaagtgctgggattaaaggtgtgagccacagtgaccagtccttgttacatttaaccagctactattttctatatgggaaaactacagatctcagtcctttttttttttggtgatattctaatggtttttcattcatttaattttttgaaatcagataattgccatcttttctctttttccatcattgtatctattttttttcttgactaattgcacaggctaagactctcggagcaatattgaataaacaggcaatggtggctctaagacagggtttgaggaatggcagtgggcggcagggagtgtgcctgcagagcagcctgaatgggtatttcccggagggaaggtggtcacgtgtctagggaatgctccaaagaaaggagaggatggtttcagtacagagtgagggttgcgcctttgattaggtaagtggtgaacagttattagtgctttctgagcatcagactggcagagtcaggtcatattttagaaggactgctcaggtagaggtgaccacagggaggtgggacccagacaagtgtgacccattaagtccttacgaatcattaaaggagaggtgctaaggatgggagctgagtgcggctatgatggaagacgccaggagattctatggagattagtgttatcttaaacccctctggccctgcacatggggagagcaagttcatgcttcttcctaaagaagtgaagcaaggacggagcaattttccatctgatgtcaggccctccctgatggctggccccaagggcgacctctgtgatccttcctgtctcaccctggaaaaaaatgtctatattctcacttcatacttccaagttatgccttggttttttgggtttcatttttgttattggttgttggatgtaaaataaatagcaatgcataaaaactcaaatttttcagctgcgcatggtagctcatgcctgtaatcccagctatttgggaggctgaggtgaaaggattgcttgagctcaggaggtccaagctgcagtgagctatgatcgcatcactgcactccagcctgggtgacagagaccgtgtctcttaataaaaacaaagaaacatccaagtgttcaggcctcaaagggctgtggccccagctttcagtgtaactcatctcacaaatcagtggtggtaactcaacttcgtccttctgtggtcaagtttcccccaactgtctctgttatctgaccttccttggctcagccacatatgggtctgggagcacagtggtcatcaacaggtcgatggagatggctggacctcagcagcagaagagcaagaggagccagaggatgaaactccatctggaaactgtgagaggagaagccagcccaggccctgcaggagggagcagctactcttcccagcagaggcaacaaggaggggcaggagcaagcaggtagggagagaaggggcagccttcatggggcagagaggggaatgggctgatgggagctggcagggcttctgtgatgagtttgggcagtggggtgcattttttttgagatggagtcttgctctgtcacccaagtagggtgcagtggtgtgatctcagctcactgcaacctccgtttcctgggttcaagtgattctcctgcctcagccttgtgagtagctgggattacaggtgtgcaacatgatgcctggctaatttttgtatttttggtagagatgggatttcaccatgttggccaggctgatctcgaactcctgacctcaagtgatccgcctgcctcagcctcccaaagtgctgggattacaggcttgagccactgtgtacagctgggtgcatgtttaaaaatagaggtttgctgggaggtggaggttacagtgagtcaaagtcatcccactgcactccagcctgggtgacagagtgagactctgtctcacaaagaacaaaaacaaaaaagaggtttgacctgagaaatggagacacctcaaagtcctagagggatacacccagggggaggacaaggcccagcagaaagacctttgtccctctgaccccaggtcccaccaaggaacccaagctcttgtggtggggggcctacctagaccccactctcaagccataccctggctctgctgggcttccaactggccctagctgcccctggttgtctttattttcataaggatgaaagcaatgccgtgtccctggcttctgggacatcaaggtccgagaatgatggtagacagtggatagaccccaattttctgcccaagcccagcctgggattcctggctgggggctttgacttggcagctggcaccagggtgtctcatggggatgcaggtgatggtttgaaatagcctttgcaaaaattatgacaatgagaagacccactgactctatcttgcttttaacctctaagctgcccttgttcatttgtgggcatagaccaagctaacttatggaaggaatttaccttatagtttaacttcgaaacaaagatagtaacagccccttcctgaaatgaactcccttcttgcctggggaccacaccacctaggtaaaactaaggaattagccacaagattagaaattatggtttaggagtcatgcagccagaggccacaggattcctaacttccccagttgctcctatggataacatcacattcatcaaacctaagattggtgtttgagacagttttcagacactgcattccaatggaccagctggtgccacccagactgataaactggctcagctagttctatgatcctatctagtaagagaagacagcaacaagaacccacttcaatccccctatgatttcatcgccaacacaaccaatcagcgttctccactccctagccccctgcccaccaaattatccttttaaaaccctagtctctgaatgttcagggagactaatttgagtaataaagctccagtgtcctgtttatctggctatgcatttattaaagtctttctctattgtaataatgctgtctcagtagattggctctatctaaccagcaggcaagaagaacccattgggcagttacaggctgctgaatgacaaggctgctcttcccacacctgacagtgcctcagcctcagctggcaaaactcatcacttcacctgaaaagggaaaaaacccagagctatctctggcaatagaaggagcagagttttcctaagcatccaagacagaccccagaccctgaacgaggtaggagactactcatcctggcaactgcttactctgattatggggttatgaggcctgcttcaagggagaactctgaagttgcagctttccctttccatgacagaccttggctcatggaccacacccctgccccatctctgcttggcttgtgtttcatggtctgcatgaagaaccaatctaagtctggttttggctttatttatttttgagacagggtcttactctgtcacccaggctggagtgcagtagcaccatcacagctcactgcaacctcgacctcccaggctcaaggtgtcctcctgcctcagcctctggagtagctgggactacaggtatgcaccaccatatttagctaatttttaaattttttttttagagacggggtcttgctgtgttgatcaggctggtttcgaactcctgacctcaagcaatcctcccacctcggcctcccaaaagtgttgggattataggcgtgagccagcatgcctggcctggcttaatgttcatgtgcttgcccttgctggaaagagagcctattggcaattgatgcagagggagtgttttaattaatggagctggcctgaacatcaggctggtgcaactttactcaacgctaaggatgatcacagcttaacgtgggggagaagaaagcaatgaaagaaatagatcagatgaggcaatattgggagtttatgaagtctgtgtattttccagtggctccacagtgatcgctcttaaaccggctgtcacccccgcatgaattatcacctcaacctgggaggatggggaggccgacaagacatacaaccacacacaaggcacgggctcttgcctggatcataattcttcctcatgctgctaaaacggagagcgctgcgatagcaaagaggcatgtggcccttgtgatatcttcagaaagaaaaaaccctgggggcaagagaggaaagaagaaagctaagaaataaataacaaagcaggatgctatttacatagtgagggaaggcctttgagactgagctcagcgccttggatgtcagtaataactcagtgatgggaataaagagactcactgcaaacccacatcgcctgagatggtatcagcgatgtttttctctttgtttccagacaaattccagcacagcgatgggaagacaagcctgtcgaagggaatggtgaggtgggggtgagggtgagtccggtggtccccgtgaagactcaattatgttggctgtgaagagattaatgagaattgaattttctattgatgtaaaactgccttttgcacctgctgctggcatcctcattactggttttccattacaggggattatatggtacaacgaaataaactttatgcttcctgggggatgctcttaaaatgggtttactgtactcaaactggtggtgaagtgggttacctgagagaaatatgatttaatccctgtcttttccttttgtggaccagaaagcctctatccccttctggaaatcacgaggtgcagacgttttcaggtctgcgggccaggctgaggctctgcgaggtataggcccaggcatgccctgcttgctctgtccctaaacatcacagggatgatgaagttgaaggaatctttggcttcctgcatcagaatgaatcacagggagtgatgctctggaagagctggcccagagaccagagtgtagggaattggggtccttgggatttctgtaacttgtcctttgggaaggaggtaaatgtgtctgtcggtggaggcgtgagaggcatctgtggccttagaagataatgagcaagtaaacaccaggtgagagaaaactgcttcctgtcctgtgaaccacctgctcctccctccctcagttgagctggggaggccagggtccagggtgaaaccatctctgcccaggaaaatctcaataaatgcttctttaaattgttttaagttttagggtacatgtgcagggtccagggtgaaaccatctctgcccaggaaaatctcagtaaatgctttttttgttgttgttttaagttttagggtacatgtgcaggtttgttacataggtaaacgtcccgtggtggtttgctgcacccatcaccccatcacctaggtatcaagccctgcatgcattagctatttatcctgatgctctccatcccccaccaaccccagaagccccagtgtgtgttgttcccctccctgtgtccatgtgttctcatagttcagctcccacttgtaagtgcgaacatgcggtatctggttttcagttcctgtgttagtttgctgaggataatgacttccagcttcatccatgtccctgcaaaggacatgatctcgttcctttttatggctgcatagtattccatggtgtatatgtatcacattttctttaaccagtctattattgatgggcattttggttgattccatgcctttgctgtaaatgcttgttaaatggaaaatagtagcaccaccctcaagagcccttactcatctccaaccaggataagtactgatctttcagcctctgctgttccatctgttaagtgggcataaaccaggatggtgggggctatgggaagccattattctcagcagtttgatgtagaccttatttcatcgaaatcacctttatgatgctaccttctaaacacagcccaaaattggatctccaagaatgcaggtggtaccttgtgtttacatgagggtgcactagaaccccatgttatgggggagccctgtgagctggagtgggaagcctggatgggaagcagaagtgtcagaggcccacacacagctgtttgtgcttgtctctccctgaagcgttgttcaggatgaacctatcttgagccccagagtccacagatgtcactgcttctcctgagcagctgccatggcagatgctttcccgaggcagggcgggggaaatggttgggcaacggctgggcactgccttaacttctctgaagcatcattaaatttgtgttcaaagtgaagattgaggaattgggcgcagtggctcatgcctatcattccagaactttaggaggctgaggagggaggattgcttgagcccaggagtttcaaaccagcctgagcaacatagcgagacctcatctctacaatttttttttaaaaaatagctgtgcatggtggcatgtgcctgtagtcccagctactcaggaggctgagacaggaggatcacttgagcccaggagttagagggtgcggtgagctatgatcacaccactgtactccagcccagacaacagagcaagaccttgtctataaaaaataaaaaaaaagaggctgggtgaggtggcttgcgcctgtaatcccagcacttcgggaggctgaggtgggcggatcacgaggtcaagagatcgagaccatcctggccaacatggtgaaaccccttctctactaaaaatacagaaattagctgggtgtggtggcacgcgcctgtagtcccagctacttgggaggctgaggcagaagaatcgcttgaacccaggaggcggagattgcagtgggccgagatcatgccactgcactccagcctggtgacagagtgagactccgtctcgaaaataaagtaaaataaaataaaaataaaataaaataagaaagaaaaatgtttattgtaaaataaaacagacagaaaaaaataagtcaaacacatgtatagcttatggagttattattacagccaccacccagaccaagaaatagaactttgccaatgtccctgttgtccctgggaagcacctcctgggtttccttctagtctgaactgccaccttccctgcaaaaatgaccctcacatgacttttacagtaacctcttttctgtctttctttatgtttttgtcagagttttttgaaccagagcaactccatcttgaataggggctgggtaaaatgaggctaagacttacttggctgtgttcccagatggtaagggcattctaagtcacaggatgagataggaggtcagcacaagatacaggttataaagaccttgctgataaaacaggtcgcaataaagaagccagccaaaacccaccaaatccaagatggcaatgagagtgacctctggtcgtcctcactgctacactcccaccagcgccatgacagtttacaaatgccatagcaacgcaggaagttaccctatatggtctaaaaagggaaggcatgaataatccaccccttgtttagcatgtcatcaagaaataactataaaaacgggcaattagcagcccttggggctgctcttgtctagggagttgccattctttattcctttactttcttaataaacttgcttttgctttgcactgtggactcgccctgaattctttcttgcacgagatccaagaaccctctcttggggtctagatcaggaccccctttctggtaacatctttcatcacctaagtgtgccttccaagacatatgatgtagttttgccattttaaaaaaatgcgatctatcgtttgagtctctttcaatccacaggtttcctcccacttcttttctttacaatttctctatcgaggaaccaaagccttttgatccacagagttcctactgtcgggattctgctgattgatactcttggtgcagttcaagatgttcttccctatttcctgcaaattggcagatggatccagaagttggatcacactcaccttctgtccttttggcaggaccagaggtgctgcattccttcgttaggaggcacataatatccggtttgcctctctttgtgtgatgctaacagctgttgcagcacaatgcttagctctgttaattcactaggggtttcaaaatggtgatattctaattctgtcacttcctcacatattaacttgagtacttttaaaaagagatgcttccagtcgtccaccatttgcttacccagtggtacagttcacatattaaacagaggcaggataaatgtgcgattctttcctcattatttacctgtttttcagagagtgaatttgttcctcatcctctgaaggtgacaatgttttaagtagtttcataaattgaagatttaaacatattttatgggtttttatccatcacaattatcgtctttactgatgctcaaatggctctatgtttggccagtgggagccccttgcagatggttcccgtgtccttttgatatgatcttttagtctctgatagcctccttgctatccagcatgacaagatgtccaggcttatcttacacatttcctgttctagacctgcaatcagccatttttccaagaagtcctggtttcaatcagtagagaatctatctatctatctatctatctatctatctatctatctatctatctatctatcttctatccatctatcatctatctgtttatctatctttttaaaaaagaaaaaatgtcaaaagagtgagaagacaagccacagactgcaagaaagtatttcaaaagatcccagcactttaggaggacaaggcaggtgaatcatctgaagtcaggagttcgggaccagcctggccaacatggtgaaaccccatctctactaaaaatacaaaaattagccgggcatggtggcatgtgcctgtaatctcagctatttgggaggctgaggcacgagaattgcttgaaccctggaggcagaggctacagtgagccgagatcccgccactgcactccagcctgggtgacagggtaaaactctgtctcaaaaaaaaatttttttttcaaaagatatatccaatagagaactgctaaccaaaatatacaaagaaatgagctatcaagccatgaaaagacatggaagaaacttaaatgcatattgctacgtatacggagccaatctgaaaatgctgcatactatatgattccaactctatgacattctggagaaggcaaaagtgtggagacagtaaaaaactcagtggttgccaggggtttgtggggagggaggaatgaatcagcagaacacagaggatatttagggcagtgcaactattctgtgcaatactgtaatgacggatgcatgtcattatatatttgtcgaaattcacagacaataagagtgaaccataatgtaaactatgaactttggttgatgttggtcaatgttggtacatcaattgcagcagacgtaccacaacgatctggagtactgatggtggaggaggctgtatgtgcctatgggaagggggtatatgggaactctctgtactgtccacttaattttactgtgaacctaaaactgctctaaaaataaattctattaagaaataaatgtaaaatgtctcatatgtctatattgattcttccaattcaaatgtagaattattgggtgctggtcgggcacagtggctcactcctgtaatcccagcactttgggaggttgaggagggaggatttcttgatcccaagagttctattgcgaccagcaaacatagcaaaatgtccatctctatgaaaaaaaaaattaagaattattggaggttgggtggagtgactcatgcctataatcccagtactttgggaagctgaggtaagagggctgcttgagcccgggagttcaagaccaacctgggcaacatagtgagactccatctctacctgaaaaaaaatttgtaaaggaattattggatgtttacttaaattctttcttattcctgaactcctttttctcaccaaaaaaaatcctagttctcaaaggcccaggagatgacagaattgaaatacacaagaattacttatttcctttatcccatattacacacacagcattcttagtataaaatgccaatactacttccatcaacatcattattgaaaacagttaaaatttttttattatgctttttttctgcatgcatttcttattctcttatccctcaatttataaataactgtactatatctatattgtcagagaatatagccattatatactatgcttttttaaaattttcacttattcttaattctgtaaattatatatttaatgttcaccaccttatgttgatgtctctctagacactttgtttctctgaagttcattctctagtgaattcctcaggaaggaatcatgggaacaatatttcctgaactgttacatactgataagtttgtttgtaccctttatacttgaaagtcagtttccctgaatataagatccttggctcacattttattttcttgagttatttaaatatgttactcaattttcttctggcacaaatgttgcagtcaaaaagttgatgataatccaatttccaatcccttacaaatcatgggctatttttgcttagacactcaaaagatttttcttttcctttgaagttctatcatttcactaaattcatgccttggtgttagtcattctgggtcagtactctcaggaacatggtgtgacttttcaatatgtagtttgaaaactttttatttctaaataacatagtacctttttgaactatagcttctagtatttgttctgatccctgctttgggtttttcttcagggaaccctgttctctgtatgttggatcctctttacccaacttcgagatttgtcactttctcctgaagcctttatatccttgctcatttcttagatttttaaaaatttccatttgtttcattttctgtttcttctgaggaattatctcttgtgtttattcactcttgcaatctttctaggttagtcttaatttctgaaacttttttcttttaaactcatttccccccctaaatttgttaatttctgagtttttctatttctgatttatgttgggtttttttgcatcttattttgtttaaataattgcttctagcttgtcttaaaacagtaggttatagttttttgttttgcaggcatatcttttggcatgtttttcattatctgtgaagatgttattctatttcttactctttttaaaaaaaaactgtatagagtaggactttgatctttgcctgctgctcatttttgtaaaggtgaaattaatttttctgaacttaaaaatggggttgagttcaagacagcttttataacttcacaaagctt

SEQ ID NO: 85 - DNA, 2845 bp, Homo sapiens
  Genbank Accession No. L11066
ggtttccagaagcgctgccgccaccgcatcgcgcagctctttgccgtcggagcgcttgtttgctgcctcgtactcctccatttatccgccatgataagtgccagccgagctgcagcagcccgtctcgtgggcgccgcagcctcccggggccctacggccgcccgccaccaggatagctggaatggccttagtcatgaggcttttagacttgtttcaaggcgggattatgcatcagaagcaatcaagggagcagttgttggtattgatttgggtactaccaactcctgcgtggcagttatggaaggtaaacaagcaaaggtgctggagaatgctgaaggtgccagaaccaccccttcagttgtggcctttacagcagatggtgagcgacttgttggaatgccggccaagcgacaggctgtcaccaacccaaacaatacattttatgctaccaagcgtctcattggccggcgatatgatgatcctgaagtacagaaagacattaaaaatgttccctttaaaattgtccgtgcctccaatggtgatgcctgggttgaggctcatgggaaattgtattctccgagtcagattggagcatttgtgttgatgaagatgaaagagactgcagaaaattacttggggcacacagcaaaaaatgctgtgatcacagtcccagcttatttcaatgactcgcagagacaggccactaaagatgctggccagatatctggactgaatgtgcttcgggtgattaatgagcccacagctgctgctcttgcctatggtctagacaaatcagaagacaaagtcattgctgtatatgatttaggtggtggaacttttgatatttctatcctggaaattcagaaaggagtatttgaggtgaaatccacaaatggggataccttcttaggtggggaagactttgaccaggccttgctacggcacattgtgaaggagttcaagagagagacaggggttgatttgactaaagacaacatggcacttcagagggtacgggaagctgctgaaaaggctaaatgtgaactctcctcatctgtgcagactgacatcaatttgccctatcttacaatggattcttctggacccaagcatttgaatatgaagttgacccgtgctcaatttgaagggattgtcactgatctaatcagaaggactatcgctccatgccaaaaagctatgcaagatgcagaagtcagcaagagtgacataggagaagtgattcttgtgggtggcatgactaggatgcccaaggttcagcagactgtacaggatctttttggcagagccccaagtaaagctgtcaatcctgatgaggctgtggccattggagctgccattcagggaggtgtgttggccggcgatgtcacggatgtgctgctccttgatgtcactcccctgtctctgggtattgaaactctaggaggtgtctttaccaaacttattaataggaataccactattccaaccaagaagagccaggtattctctactgccgctgatggtcaaacgcaagtggaaattaaagtgtgtcagggtgaaagagagatggctggagacaacaaactccttggacagtttactttgattggaattccaccagcccctcgtggagttcctcagattgaagttacatttgacattgatgccaatgggatagtacatgtttctgctaaagataaaggcacaggacgtgagcagcagattgtaatccagtcttctggtggattaagcaaagatgatattgaaaatatggttaaaaatgcagagaaatatgctgaagaagaccggcgaaagaaggaacgagttgaagcagttaatatggctgaaggaatcattcacgacacagaaaccaagatggaagaattcaaggaccaattacctgctgatgagtgcaacaagctgaaagaagagatttccaaaatgagggagctcctggctagaaaagacagcgaaacaggagaaaatattagacaggcagcatcctctcttcagcaggcatcattgaagctgttcgaaatggcatacaaaaagatggcatctgagcgagaaggctctggaagttctggcactggggaacaaaaggaagatcaaaaggaggaaaaacagtaataatagcagaaattttgaagccagaaggacaacatatgaagcttaggagtgaagagacttcctgagcagaaatgggcgaacttcagtctttttactgtgtttttgcagtattctatatataatttccttaatttgtaaatttagtgaccattagctagtgatcatttaatggacagtgattctaacagtataaagttcacaatattctatgtccctagcctgtcatttttcagctgcatgtaaaaggaggtaggatgaattgatcattataaagatttaactattttatgctgaagtgaccatattttcaaggggtgaaaccatctcgcacacagcaatgaaggtagtcatccatagacttgaaatgagaccacatatggggatgagatccttctagttagcctagtactgctgtactggcctgtatgtacatggggtccttcaactgaggccttgcaagtcaagctggctgtgccatgtttgtagatggggcagaggaatctagaacaatgggaaacttagctatttatattaggtacagctattaaaacaaggtaggaatgaggctagacctttaacttccctaaggcatacttttctagctaccttctgccctgtgtctggcacctacatccttgatgattgttctcttacccattctggaatttttttttttttaaataaatacagaaagcaaaaaaaaaaaaaaaaaaaa

SEQ ID NO: 86 - DNA, 160771 bp, Homo sapiens
  Genbank Accession No. AL035091
gatcttgtttggagcctgactcaaaccaactggctgttttcaaaaaaaaaaaaaaaaaagaaagaaagaaagaaattgagacatcgaaggaaagttaaacaccatttggatatttggatgacaggagatatttagggatgactgtgctttttcaaggtgtaataataccactagggttatgtttttaaaaggtattatcatttagagatatattaaaaagtatttatagataaaataatacaggatctaggtcttgctgtaaaataatccaagaagggagtaagaaaaaggtgggtgaaggtataaaagaaatgagaaaagccatgtgttgattacaagtcgaaaaactgggggatgggaacattgaggtgtattacgctaactctatctttgtgtacctgtgaaaatttccattgacaaatttgaaaaaaaaaaaaagactaaccataatgtcaaaccatagttaatttcctcgcatttgccgcactgttggaaaataactgagaggcatttttagtcatacatggacacagtggtttctgaggagaccagcagaacagagctgagagtcccatcttttctttatccctgccatcatgttcatctgagactcacttgtgtcatttctgctttcatcctaggcctgaagaggtctccatgtttcctctcacaatggctcctactctccttccactcttcccttctctgccgctggttagttcttcacaattctggtggccctctgctatacccaatgatcctgactacctctaacccacctttgtagccaggttatattccttccttctcatggccctaatgccaatggattctgtcatgcccacacagctttaacccttctcttttccttaaaggcagtcacttaaaggcactcatcgtcatacatccaagtatgtccatcttcccccaaatttgtcacacttgctgcgttaagcacctctcttcctccacttacccactcagattcctcctgcacatttccaggacagatcaaacaaggatgggtcaaccaataaatatctgaggcctattgtgtgccaagctctccactcagcactggggtgacagcaaaggacaagacagatacagacatgctctcttgaagcatgtgatccagtgcagatggaattaaaattggttcagctgcccataaaccttccagatcaaactgtgaatcttttatttacctctgtatcctgagaacttcacacagcgcctgccatataatagatctttaataaatatctgataaatgatatttatttatccaagtcagtgcagttgtctcaacataagtttaagaccatatagtatggggtcaccctaaaccctacaaatgaaaagatatttaagagagaatgttttctttataacagcctctggggaaactgtgtcggggaggtatgaaggaatgctcctagagccagagttaccattaccagctaaaagcagctctaggtgtgctcgacttctgtcttctttgctattatggattgtctgctccctcctcctgctgctggcctcctccctatcaagtgtaacgagaatcaacctcagtcacctccgttccccctgctacttccagcaagtggtttcctcctgctaccaacgtgtctcacttcctatctgagcagaactgccccaactgctgggctgctgctgttctgcagcagcgagaactttagccctgttcctagctaggagtttcagcaagactctggcttgaggaccaggtcaaaaaggtggaaactaggacacagaaggactccatgaaggttggctgcaggaataatgaatgctgattccagtcccaagccaacacagacacatgtcccacaaacgccaagcccagggccttattctgacagagtggatgagtgccaggttcagacagacatgccaggctgggttgcaggctctctctgtggcggcatctccaggaccttggcactaaaggtgccagtaagatcagaaacaatagagatatcaggggaaagatcctacaggacaggcggaaccaatgagcctcctttctcctcactcaacactgggcttgggtcagtccagtatatccttgacccaacacttgggtcagtccagtatatcctctgtactgcccagggaaatcagaatgagagggacagtagcttgtcaaacccagtcctgctgaggaactcaggcctccaggctccagggaaaaggctgaaaatgaaagagctttcctagatacagagtgactatttttgagctgactctaataatctactatttcaactaccagatcatcctctcatgggatcacaaagacaggcccaatgcagaatctttaagaaccctagaaatctgaaatagccatcataagcatcctcagtaaaaggccaagcacttttctggtagtctacagcaggggttgacaagtttttatcttttatcctaaagggcaagatagtaaatattttaggcttatggggcatacaggctcccttgcagttactcaactatgcccttgtagcatgaaaccagcctcagacaatacacaaacaacgggcgtgtctctgttccagtgaaactttatttacaaaaacaggaatccggcccacgggccacagtttgcaatccctggtcattgggaaaacctgctcttccagtatttccatgctccaaagaggaacagaggctcccatccacccggagggctcctatccacactgaagacagggacccattctggggactaggcctccatccctactagtccctcccacaaggtactaagaaatctaggctacttgttcaaaaagcctggtctgcatcagaaacctgggcaaaggtggaaaaagctttccagacatcaaatcagagggcttcagaactggaagaagctagatccctaagactagacacttaggcctggaaaaggaagtggtgtgtccaagatcacgtagctagcaaaagtctcctgactctgtccagtgctcttactcctccagggtgataaacagcttgctagaagaggccaaagacttgtggcacatttctacagcacgtccccgagctataagcaaatggcacaagaccttgggggaaataagtgcatgcgtgtgtgtgtgtgtgtgtgtgtgtgtgtgtgtgtgtgtgtgtgtgtgtgtgtgtgtttccaggtatacctggacatagttactagggagaggaaaacttaaacaaaaatcctaactttaaaaagggatatggtttggtagaagatgtgggtttttgttagcagaaatgtccagggtctgggcaagccctgggataataaaccagtacaaggcatacagcctcactcaattccaggtaatgccccaggccctaggatctacctctacccaccttcaagcttcataatccaatatccttcaaatcttttcccagaactgacttccattgcatattttacttgcctgaccataaacatttttatttggataccctgccatcatcttgaaggcaacatgtctaaaagaaaatcaaacatgactccccaaaacaagtttgaactctaatgtttctatttctataaatcactaaggttcaaaatttcagcactttctcttccccacgtcctgtcctcaagccagagtagcactccaaattatctcttcttcttcatttccacaggctccaccctaacctatcacctccgatctggtatgttgctagtctcctgctggggaccccagattccaggcttgcaacaatgccagatcttcccccatatactcatcctccttccattcaccacagtctcttcaaggtcaaggtccagtgctactcaccttcggcttcccagttcccagaacctcacctaatatggggggcacacaataaatgctgaatgaatgaatcacagttttcatcacaagatgaaagaaaaaacttaaacaaaaatcttaacttcaaaaagggatacggtttggtagttttcatcacaagatatctgcacaagaaacctcaggcccttcctagttcctactccctcgaacccagactgctgaactctgaaggcccaccatcatctcaccctgcccacctcagctcctaccagcccagaaacaggcttttggctctatctagctcatcaatgctggaccctcctcatgtgccaggcattcctgcatccacatctctgcccacgctctgctcaccctgccctgtgatgacgtccatgcccttccccctgcatctactccaactcctacgctactgccaactgccgagctgtggggggagacaggggatgcaggaagaggggagatgataaagaagactggggaaaggggagcatgatgaaaacatgctggggtctctctctgatccttggaagcataaccctctcaatgggtcacaggcgatttagagaaggaagagccgggaggaggagccaaatttttccactgaacgaaaggcatgattttcatcactgcttctgttgccccggtaaccagggacagcccagtggagagtacagtaaaagaacaccatgtttatctttgctgtctgatctacttccctgtacacccttccctgaccatcccctagccccaggcctgctccaaatctcttataatgccaccaccatccttctagttacccttgctcctcaaaggcagagctaatttctccctctctttatccaaccctaagtaccatgtgttcttccactgcaacattttggggttcatctcgccatgccacctgccatgccaggggtcccccaaaacaaagagctggtatcaaagcacaaggatggcatctgctctaccagacagggcaagtgggactagtggggcaggaaggtgaggaaaactgcccagccaaccgtgttctcatcccacacagctggtgtggagagggacctggctctcccagcccccctcctatggctgagatcaggagaaggagccaggttggggatcgggggagtaggttcacccacaggcttccacagatcctgcctcccacacggacaccgtgtctgcgtgacctgagagcggagacacagtgctcgccctggaagattatataagcgttatataacatggtggcaccaataagcacacaggagcagttgtcgagtgccagggacaggccaggggtggaaccaaacccaaggggctggaggttcagccctcctgccaccaatgccaaagcagcaccaggccctggctgcctcggccctgtctatacctgctccttccagcccagaggacacagagagaaacttgccaggctctgcgctcttcttcccactctgggcagcagggaggggccgcaaaaccgtcaccaccctgggccatggcagcctctgcccatccggcctaaggcagcctagctgcctttcctgcaggggagcagccatggggtcctcggcaggggaggggtgtggaccagtagccccctcctctctgtcctcctaccagaatgtaggagcacttgtttggggaacaagtgctgcaacagcagctccaggattggctgggccagccgttcctctgctctgtcacttgctgtttctctaaaaaacaaaacaaaccgaaagggaaagaaaaaaaaattaagcacatttgacaaatgccagatcccaaattttggtctacggttgcaaagctggaaggaaggggtcctaaggaaattaccctatttccctacagcccccatctcccaccattcctggccaattcaccatctatgaacttgggctgtgagcctgaagattgctccgcagcccctatctctggagctgcctcagtggctgtagctccttcgggtaatattccccctccctctacagaatgctcagagtctgcggctcccggatatacacgcgggactaggcggccggcctggggcagttctgggcagtttgggccaggtcttaatcaaactcctccaccgtcatcaccacacccactttattaatttggcaggggtgggggcagctgaacagagacagagccaagtgatctcccgcagcacctgccctctcctgagctatgcctctggccttcccgcctcctcctccacacggacctccgcgccccctgaagaaggggggaaaaagaaatacgcattaatacctcgagccttggcgcaccagccctcgccccctcaaccacctgtctctgcgttctcccccgcagccttcctcaactctgggcgccccctctgcagcaaaggggcaccacgcccactgcggagaggagaaatgcaaggtggggagcggacaggggctcacttgagggcccgggggctgctcactcacccctgcgcgcagctggccctggccccagagcctggggcccgcccggagctgctccaggccgcgaccgctcccacccccgcggcgaggccagcagcgccccaaggccgcgctgcagccggggtggggcgcgaccggagcgcggccggggccctgggcatcgtccccagggagcccaccctaccccgggacgctcggggaccgccctgcaggcccggcccaaggtgcccactcccacctggccgagtcccggctcttacctcggcggccttccgccctccgggggtactgcgcaaacaggctctcccccggcccccgcccgccaagcgccccgctgcaggcccgagatgcgcagccgctgcggacgccggctccgcggcggccgcttcccgggcgtgtgagctcagcctgcccgcgcgcccgcgcttcccacgctcggcgtcccgcgcggcgccacccagcggccgcgtcgggcgctgcacgctcgtgtccgggaaaatctgcagcagccgggcctgccaactgattcggaaattcccagaatttgaccatgggcttgcggcggggcgggagacctgtcaggccgtgtggccgtcgctagactcggggcagagcagctcccacccaccctgtctctgaaggggactccagagtctttgcaagatattctgatttcccccctgttcctctgaccttgcctcgccatatttcttccagggcagtggagactgtggggatgctggtgactccttgtaaaatgggggtggagaatcgaggggtgggaaatgggtgggaagcgctcgaggctggcatctcaaggcctccatgggcccgtctagagatccgaggtgtgcactgagtcacttcccgagcttgttagaacacacatgcacagatgccccagcctacctgtaaattctaattcggaaatttcaactgctgtttttaaccttttcttgtacctacacccttctgagaattgcagaagagctatggaccctgtcttcaaaaaaagcacatgcatacagaaatataattttgcacaatatttcagggaattctgaaactcctcaaagctccgtggatcccagcttaatatctcactttgtgcagataccctaagcagaaagagcgagctggtgattacctgaatacgctgccatcttatctcatgctttttcctccttcagggatatctccactggacgcccaacctcacatttccgcctgtagaaattccacctgtcctttaaggccaactcgaaaacctcttcctctctgattttcccaatcagcaatgtcatttatgacctcagttttctgagagtatgtcttttatggctgttaacatgttataaacacacctgtatttatttctgtggttggttttcttatctccttctagatagcaaaactgttttaagatcagtttctccctctgcaactactaagggccttacatggtatgccttcgacaaacagttcttaagtaatcagagagattggattgagagaataggaggcccagcaaatgcctttgctctacctgcacctttcctcccttcctgatgctccaccacatggacctctaggcgtctggaaaacagaatcctcaagttgataggcttatctcattcattcctgctcctccaggcaaggcagccataatttaggggttcctggatgaagttgcaagacaagttcatgcaggacacacataccaaatagcagatattctaccaccagtgtctcctagtccagtgagggatgtccccacccgcctggtgcacaagcaatgtggatgtcatccttgacttttccatctcacttccctcctttcttgcacatatgccaatcaatcaccacatcctgattctacttcctaaatcttaaatctctaagattggccctctctttattcctagctcattccaccattatttcttgctgggatttctgcatttgtctctagcctaactcgcctacctgcctccagcctcactaggcccagatccagtctccacatctgctgtgtactgaatgtctgtatctccctaaagcttgtttgtgtgctctttctctctctctccctctctgctttccaacacgggaggatacagtgagaagatggccaactgcaaaccaggaagcagaccttctccagacacagatctgctgatgccttgatcttagactaccttgcctccagaatggtgagaaataaatgttgtttaagccactcagtctgtggtattctgttgtagcagcttggactaagacaatatcccatttagaaggatcttgcaaatatatcaatcccttccctacgtaaaactcttatgcagtttcattctggactaaggatgaggttcaaactcctttgcctggctcacaaggcctcctagatctgggcccaactgactctccagcctcctgtcttggcacagcctccactcttacctatatgcttcacttgtactaaacaccatgtttctctccatcttgataaaagtcctcccccaattttttttttgagacggcctcactctgtcactgtcactggggtgcagtggtgtgatctcagctcactgcagccttgatcttcccggctcaagtgattcttcaaactcagccccttgagtagctgggactacaggcatgcgctaccatgcccagcaaatatttttgtatcttgtagagacagggttttgccatgttgcccaggctagtctccaattcctgagctcaagcgatttgcctgcctcagactcccatagtgctgagattacaggcatgagttgccgcacctggctgtccccgactttttgagactttgtttcacctattcctcaggtttcccaactgtctcctcctgcaccacctggcccttcctctgctataatatgaaaatcacaatattgttattgttcttatatgacgtctgctttccctgccacactaatacctctgcgatagtatcctcaatgcctagcacaatacctagtgccaaatgggaacacataaatatttattaaatgaatgaaagctttgaacatggcacatagcccagatgagagactctgggggtaaatgcagtggtgcttcataatctaaaagtcagatagggtgggacaggcctactgctttttaataatagcactattcactgttttcaagtgaatttcaatctttctgagttttttatttccttatctaaaaaatgaaaataataataattagggttgctctgaaggtgaccagagatatatgtgtaacaaagtattttgtaattttaaaattctctctctctctctctctctctatatatatatatatatatgttagaagtattgtattacttcacttgatcctcacaataacattttgaatagacagctgacatttcctactttgcatataaggaaactgaaggtagacatggtaaagcaatttgcctaaggtcacccagatggttgccaaggaacagaggcctgacatgggatttcaagctcagactctctccgccacatcatcactgctcctctctccatccccaaagtaggtatcgatgttgggacacgtacatgttgacatcctgaggatcatgcagctcataaatgtcaccactgaccgcttctgaagggtttttatgtgtgtgtggatgtgtttgttgaggcacagggggcagaggtgagttgttggtagaaaatggactatatatcaacagttaccaagataggaaagaatggggtggggaggaattggccttggccttgggtctgaccctatgctctctatctctgccccttctcttactctaatggggctacctcaattgacagccccctttactgtgtagttggacccccgcaggctctgagcttctcagaagctggagatcttccatttcctccatattttcaattctgtccatcagcaaatgtttattgagctcttaccaagtgctttgtcacagcccatggaagcctggccaaattgcttaacctctctgagccacagtttccccattctgcaaaatgggattgatagcccatcacatggctgttgggaggattaagcaagataacctatcaactgttggtgagctgttgctagtggagacacctgcccccaaaccccaccctgtgtctgctatttttcatatgaatgcaaggggatgtctgcttagtaactaggggacagagcagatcggaggagctgggaaagtgagaaaaggagtatgaaggctgcagtactcctcaatgtgcatttgtcagggatatgtagatggctgtggggctcagagcttgttggaactcttgaagaatgacttgtgagtttctggacccaggcagagccctttgagcttgcaaaacaaggtcaggcacggtgatgagaggctttcccaagctcttggtgggcggggagcacgaaccactgagagccacaacaggagaggcagagcagagcagccatcttttggtgaccacagctgtgagggctcatctgaggtccctttttgggaactcccagaaataactcaagggcatctgagaatgtagatgaaatcatcagacaagatattacaaacataaagaacggaggtggtgccaggcacatagtaggagcagagtgcctctgcccctcggtcttctgattatgctgccttggcactaagcatgtttgtttctcactgtgtcctgtgctgtagggaacacccagtggaactgcccttcacagatccctgagtgtggttacagtggtttttctctttaaagattaaatctttttttcccctttctgctcaacaaagacaacagccttttggtttttgataaacgttcttttcctactagcaggtggatatgcccggggcactaagaactgtgcttttaaaacacacacaagcccagctgtttgaatctgccacttctgtatgtcttacttctcttatctcctgcccccggggctgagttttctctgccttggcaggctgataacatgtggaaggaagagaacagttctaattaatagactaattagtggtacaagtctttaatagctgattatagggaagtcattccccaccccccaagtgattgatttatttattgctgttgtgctgcattattgcaaaatagtcagcttctaattatctattggctggttcaatcaggccttttccttctcttccatcttgttctttcccttgctaagggaaggcacaggcagaatgggagaactcaagccagctgatgaccaattctggacagatataagtgttgggatcctactgccactccatcttgagtgcttagagctggaaagggaatatgaggttcaagggaaaagaaggcaagaaaatcccactcattcttctaggataacgtccccatggtggccattccctcatcatccctctgactctgcacgccataactcacacacattgtcagttgcattaaaaaacagtatagttaggaaacaagcatgagaagacacaaaaagaaaaaaattaaatacaaaatagtgtagcgtggagcttaaaagcatgcactaggccgggcgcaggggcttacgcctgtaatcccagcactttgggaggccgaggcaggcagatcacgaggtcaggagattgagaccatcctggctaacacggtgaaaccctgtctctaccaaaaaccacaaaaaattagctgggcgtggtggcgagctcctgtagtcccagcaactggggaggctgaggcaggagaatggcgtgaacccgggaggcggaggttgcagtgagccgagatcacgccactgcactccagcctgggtgacagagcgagactccgtctcaggaaaaaaaaaaaaaaaaaaagtgtgcactgaaattcaacagcctgggttccaccttggctctcccactggctagctgtgtgatctggggcaagtctcttgacctcactgtgccatattctctaacctcatttgtaaagtaggaatataattgttcctccctaggactgttgaggattaaatttaaaaagctatgtaaagcacttagcacagtacctagtatatactaagccctcaaaaacattagctatgacaattactactgcctgaaattatttaacttacctgacacatcaaaggactttggtaaatgtttgtagaataaatgagtgactatatcgaaatttttaagtagattgtgagcccttgaagtaaaaggggtgaagaaaagaggaaattgaacattaagtcataataataagggctattttaagatgaaagcttatcaagaactgggctctgagctacttgctttatgtacattctctcatttaatccttatgtaacttaatttttacccgcgttcttgaatcatgttttattaacaacccaagtctggaaagtccatgttttcccaagatatatttttattttattttattttttttactttgagacagagtcttgctctgttgcccagtcatagctcactgcagactcgaactcctgggcccaagcgatcctccagcctcagccacctgagtatctggggtgagaggtgcaagccaccatgcctagctaaatttgttgttgttgttgttgtattttttgtagagacgaagtcttgctttattgctcaggctgatctcgaactcccagcttcaagtgatcctcctgccttgacctctcaaagtgctaggattacaagtgtgagccaccacacccagccaagatttccaaaaactcttggggcatggagtgacattttttgtgatcacttttccttatgaattcctgctccagctgaatttgggcactttcacctgcctgctgacaatgttgtcctcttatcacatcactctcattcatggcaagcgggccccttcttttcttctttccccaaagactcccaggacttaaggtcattttgcctggaagactttaactaaaggtcagggcaacataggattgtgacagcaccactcggaccaggaagtgctgaaaatcgtcacactagcgtgcccagcaccctttttcctggctgctctgcctcccagagccctgcctgcagccatttctccctttccccaatcctttccctccatctctctactgccctccacctctccctgaaaatatctgattactgttactttattatacaaaggaaatttaactcttttgaacaaacatctccattctgggctattctcactctgagatcagagaaggagctgagaattggatcctcagctgcttttcttaaccaaaaaagttgaacaaagtgtttattcctccacaaatgagtgaagcacctctgtgaggaatcctgctccccccagaatgaagaaatatggcaatcattttttacattacatttttttcttcctgttatacatatggtaatactatgaggtggatattagcccttgcccccttttttttcagatgaggaaaccaaggatggaaaaggttaaaaaagtaatctgctcaaagtgacatagctaacatgtcagagctggaccccaaatgcaggcatgtctgactccaaagccagagggggtgaccacgacaccatgtggccgctcggtgcagctcaagcaggtctgaagtgggttgcatccccagggtgaatcttactcaggaaacctttcacgggggacactgtatgggtcagaggaaggtgaattgattgactgaaggccaaatacattaaaatagagttagagctaggaatagctacctatgtatagcttcatgtctgagacccaagaagagatgttgctattaatcactgctgaatgattaccctgattgcttcatttgttgatgctgcagttgctgaattttactgtgctctattcaaccttgagtagggcccccctctctaggaagctaaggcagattttcttttgcttgtggagtgctgacttcacatgtaaaactgccaatgacaagttggttgcccattgatgtctaagaatgctagccaggtagctgaagctcttctaagaagctcaataaatagctatggaatgaatgaaagaatgtctcactttaatttgtcagttctctttctaaggacttacccaaggcagtgggggctgaggggtgagttaggcagaaccagatgaaggagcatcccagctaggaagcgggctgggtcaccacaatcataagggattcaagaatatcactggaaatggagcaaggttgcaaaaactgaatttatcagaactcttcccagaaacggtaatgaatgtaggtggagagaatcttttttttctttttctttttcttttttttaagacggagtctcgctctgtcgcccaggctggagtgcagtggggcgatctcggctccctgcaagctccgcctcccgggttcacgccattctcctgcctcagcatcccgagtagctgggtctacaggcgcccgccaccacgcccggctaattttttgtatttttagtagagacggggtttcaccgtgttagccgggatggtcttgatctcctgacctcgtgatccgcccacctcagcctcccaaagtgctgagattacaggcgtgagccaccgtgcctggccaagaattttcttttttaaagacagggtctcactgtgttgcctaggctggagtgctgtggtgcgatcatggctcactgcagccttgacctctttcctgggctcaagtgatcctcccacctcagcctcctgagtatctgggactacaggtatgtgccgtcacacctggctaatttatttttattattttttatttgcatagagacagatcttgctatgttgcgtaggctggtcttgaactcctggcctcaagcaatcctcctacctcagcctcccaaagtgctgggattatagccatgagccaccatgctagcggagaaaattatttaatatatcactggtggaacggtcaggaggattttgccacatattagcaatgtgactttggctttctcatacctaaaattaggattgtgatactcattgtacttttcccctcaataaatgtgataatggaaaaattacagcttttctaatttgccctttggcctactataatctggtctctgccctcccccactctcctgactgctttcaccaaggttataaatcacctctttgttgaaaattccaatcctctgccattcagtagtattagccaccgtattccaggctgtcttccatgacatattctcaagatcccaggctcatggttctcctgtctcgacatattcccttctaactcacctttgaggcttgtctgtgttcgttatctgttgctgcataacaaattaccccaaaattcagaagcttagaacaacatggataaaatgtggcacatatacaccatggaatactatgcagccataaaaaatgatgagttcatgtcttttgtagggacatggatgaagctggaaaccatcattctcagcaaactatcgcaaggacaaaaaaccaaacaccgcatgttctcactcatagatgggaattgaacagtgagaacacatggacacaggaaggggaacatcacactttggggactgttgtggggtggggggaggggggagggatagcattaggagatatacctaatgctaaatgacaagttactgggtgcagcacaccagcatggcacatgcatacatatgtaactaacctgcacattgtgcacgtgtaccctaaaacttaaagtataataataataaaaaaaaaacatggattctctcacacagtttcttgattttttttttttttctgacaaaatcttgccctgttgcccaggctggagcgcagtggcacaaacacagctcactgcagcctcaaccttctgggctcaagcaatccttctgcctcacctcctgtgtagctggcactacaggcacgtgccatcatgcctggctaattttttaatttgttgtggagacaggggttctcattatttgcctaggctggtctcaaactcctggcctcaagcaatcctcccacctcagcctcctaaagggttgggtttacagcatgagccaccatacctggcctcacgcagtttcttagggtcagcaatctggagcaatttagctgggtggaatggcttacctgagttgtctcgcttgggatgtctcatgagattgcagttgtactgtttatgtatttatttgtgtttaatttaaaacttttttttaaaggatactcttctaaggttttccaagcttcctcacatggctgttgggaggaggtttcagttcttccccacatggaactccctgtagcctaccatgacatgatagatggcttcccccagaacaagggatccacaagaatgagcatgtagcaagcctagatgaaagccacaatgtcttttatgatgtaatctcaggagtgacatgccatcacttccacccctcttgtctgacaggccaacactgatacagtgtgagaggggctgactacacaaaagcctgcctgtgaagaggtggtgtcatgggccaccttggaagttgtctactccaatatccttctttgctgaccctgaaatgtcagtgtccgccaggatttcatcctcacacctcatctcttctcattctccacacatgcccttgatactccagggtcccccagtaccttccattaccatctagattctaaagacacccatgtctgcatctttaccacatttccctctcaaaaacttcagggttgcacgttgcctgttggagcccagagcacctcaaagtccacacactccataacgaactcatcatccctccaattcgatttctcctcttgcacttccctcttgggaaggacagtgctgtctactctgttgccaggcaaggaaccagaaagtcactccctttctctcatatctaatcagtgattaccaagactttttaaagttttttttttcttttcattttttccccatctttttattttgaaaattgtcaaacctacagaaagggctggaagaagactaaaatgattcatcatttactagattgctttcatgtagattcaaaattgctaatattttgtctcatatttgctttttctcccctttccctctctccatatatatttttttcataatactactaagatgctatttaccttttcactcttattatctcacagatatactgtgtatgtgtgtatgaatatgatggacatttgaaagtaaattacagacattatggcccttcatccctaaagattcctgtgtgcatctcttagaaataagaacattctcttacataaccaaaatgccattattacacctaagaaccaaatccagttgatttcatctttccactatggtctccaatttatttatttatttgtttgtttgtttgtttattatttttttgagacagagtctcactctgttgcccagactggagtgcagtggcatgatctcggctcactgcaatctttacctcccgggttcaagtgattcttgtgcctcagcctcctgattagctgggattacaggcaggcgccaccatgcccggctacttttgtatttttagtagaggcagggtttcaccattttggccaggctgctctcgaactcctgacctcaagtgatccacctgcctcagcctcccagagtgctgggattacaggcgtgtgccactgcgcccagccatatgtctccggtttagccacttttcttcaggccacagtcttcctacccttcaataatgcaatcacctcctaaccctaactggttccttcttcagtccatgctccacactgaagccagagtaagctttctaaaatgcaaatctgatatgtcacttctctacttcagacttttcaatggctctacattaccttcaaaataaagaataagctttacatgacacacaaagccttcatcatctaaattcatctacagcagtacactccaggagaaataaaatgtgaaccacgtatgtcattttaaatgttctattatccacattctaaagattttaataaatatagcttaaattaattttaaaatacattttatttaacccaatatatcaaaaatattatcatagcaaaacatactcaatataaaaactattaatgaaatatcttacattatttttttctaagtccccaaaatctgtcatgtatttaacatatacagcatatctcaattcaaatgctaaattttgaagggttaaagtgaaatgtattcctaccaaaactataaggtcatgtttaacaacaacaacaaaacattttatgaggttccagtttttaaatttgagtttgttaaattacatatagctggaagtcctgtctctcatttgcactagccacattacaagtgctcagcagccacatgtacttagatgctactgaaatagtaacatatctagagccgcggttctcaaagcatgatccaaggtcctctgggggttccctaaaacatttccaagtggtctctgaggtcaaaacaatttgcataataatactacaaatctattttcctttttcacattcattctttcacaagtatacagtggagtgtttcagaggctacccatcatatcacaacagattgaatacagaagcagataaaagaatcagcattcgggggctgggcgcggtgtctcacacctgtaatcccagcgctttgggaggctgaggtgggtggatcatgaggtcaggagatcgagaccagcctggctaacacggtgaaaccccatctctactaaaaatacaaaaaaattagccgggcgtggtggcgggtgcctgtagtcccagctacttgggaggctgaggcaggagaatggcgtgaacccgggaggcagagcttgcagtgagccgagatcacaccactacactccagcctgggtgacagagcgagactccgtctcaaaaaaaaaaaaaaaaaaaaaaagaatcagcattcttctcttcagccagatattagagagatttaccaaagtctaaaacaatgacactctttttcctaattgtttttgttttggaaaatataattatttttcattaagaaaagcattacttacattatcatgtaattgaataattattgttatttttaaacaaattaataaataaaattttctcaattttaatttttgaaacagtaataattgatagatgtaactttcaaaatcaaaagctctttgaagttctaaatttttaagagtgtaagagggctttgagaatagctggtgtagaacctgcctaactctccagtctcatggcttgtaatttcctctcctctctcttatattcgacttgaacttccagttccagacaagatggagtggacacactttttcttatgcctcctgttaactaactctaaaaaccctggacattatatataagtcaaacatagggagactccgatatgtagagagaagaaggcagaattgggagggacttttggactcaaggaatgacatggcaccagggtggtatcagcagagatctactgggaagcctgaacttctaacctgggccagcaataatgaggtacccccttcaccccatcccacctctctgccctgcaggtgtcaacagctgaatggggaacctggacccaccagtgtggtatcaaaggaggggtgctaaacagaatctttcaataagatccagtctttcaacataaatcccaaatttccagatgcaattaaaatcactggtaataccaagaaccaggaaaatctcaatttgattgagaaaaaaccattaacagatgccaacattgagatgataaagatgttgaaaccatctgacaagaattttaaaacagacagccatcataaacatgctttaatgagcaattgcagcatgcttgaaacaaaagaacagaaacactcagcaaagaaatagaaggtataaagaagaatcacatgctttgcttgagccttaaaagaatcactcacatttctggaacaatcaccctcactttgctcctgggacaaggcttcttcctctctcgggaacacccatatctctccttttctcctctttaactcctgcttgaccaaaggatcagtccagacgtcacttctcctgggaagccttccatggtcttccacggcttccatgcccctcccactcagagcttcctataccatagcacttacactcaatgcatattgttctgtcatctgtccctcccacatccacccaatgtaaagacttgacagaagggactatgtcttatcccaggtgcctggcatagtacctggcttataataagcactcaaatattttttgaataaatgaataaattaatgaataaatggaaactcttctgtggctcctcttctattggataaaattaaactctgtggtttagctttaaacaccctacacaaactgtgacacccggatctttctggtactcggcttcccttaacacattctacttctctgtcataccagaaaacacattgtcctttgacagtaccttatctttccccatcactacatattgtatgtactcttctatcagtctcaaatgtccttactcattactatcatcaaaatcgtattcatttttacaggacccactcagaaaccacctgttcatgacccagtctcagatcttctcagctggaaagggtcctgcccacatctagatacaaagcacttcatttagtctttcctcgtgttatttctcactttctgttgtgcattttttttcttgcttctttgtttaaatgtgtgttgtattatccccaagatttaaacatttggggttcaaataaactcacatcctattcatctttgcctctgccactgtgcacgtaacacagtcccttgttattctctgagtttcagtttctttttctgagataatagaacctacttcacagggtttctgtgaatgttaagtaaaatatgctatttaaatattggcaccatatctcaattttcatacagtaagcactcaaaaactgttagctactatcattgtaaatatgattattatttgaagaactaaatagactgagcaagtcctgttacctctactttgaaaccactttttgaattctgcttgatctcatcactgccaatatgatcacctgctcccagccatgatcgttcttcttgctacggtctccttctactttcttatccctcaacctctattctctactcagcagccagcatgatccttttaaaacataaagcagatgatatgacttctctgctcaaaaccctccagtggcttcccaatctacaactaaaaaggccccatgtagtctgacctcctgcctctccccacccccactcactgacacaacctcatggccatcttgccccctgccatctgaggctttctgcacttggcagcttttcatcatagggctttgcacttgtcctttcccctgtgtgggataatctctcccagcttggcatacaacctgcttctccacttcattcaagtgaagctgtgctctccactgttatttttctaaaagtaaccaccatatgtaaaataccaaccattattctcaatatattttatgtttttcatagctctcaatcctgaaaacacatgtatatacttactgagatgacattgtttactgtcctcttctgctagaattataagcttcatgagtgtttgctgtatccccagtctcaagaacagtgtctggcacataacagatgttctggcacatttcgcgcagtgtctggcacatcataagacttgatgaatgattgaatggtggctggaagcctcttcgatgggggctttaggaagagaagcagcatcctgttgcacaaaatcgatgacctattactggttttgtgtgaagaggaagtgtgggattaatctacctagaagggatgagatggaagtgatctatttatctggacttagatggtattcccatttatccattcagatgaaaatctggctgaagataattccagatatgctctccatagtcaacagtgtaataccctacagctaattttcctgggctcactgtgggcgccgaagaagccgaacctcatggcctcctgtgatctttgtcctggggctcctccaggacctgcttggctggccaggcctaggatagcttatgttgatgaaatgctccagaagtgaagtcccaaacctatcttcacactgccacactggcttcatgacatccaactggagtaacacggaggactcggcagaagagtaggatgatatgatggaagggaaaactacagattcaggactttggaattctgggtgattgggcaagccaactcccttctctgagccttagtttgtctttaactataccataagggagtttaattaaatgtatctttaaagttctcttcaacagtgacgttctatagttatatgagctttgtgtacaagagaaattggactagagggtggggcagccagggagagacgcccaacatggaggcgattgagctgaggctgagcagtaggacctcaataaggccagcaggtggcgccattgctgtaccaggacgctcaggcccacggtgggaaagttggatttttccagaaagcaggcaaattcttgagggcaagctgtccagctgtcagagggaaccagctgccccaccccaccccgcaatacacacacagcccttcctcccaaagcatacatacacattccagcaaactcagggtgagatgcattgcaggttgctaggcctgaagctggaggtgcatccaagttgccttttcctctcctcccatatttcctaggaatctgaaccctgaacccacccctcctacttgatgtcctagctgggacagaccctcactggatcactctcaaggcaagatgtgcaactagatgcaagtgggctggacttccctactgattaccatcgtcttttgctcatcatcctttgctccaaccctcaaggcagccatcgcctttgagggaagactctgaacctcatcatttcgcctcccctctgtcctagggaagaacctatgattagaggagttggagaaaagcaagaaggagatgggggtggaggagtgctgaagggaaaggtctggctttatggagataagaatggaagaatcaacctttgtttggccccaactgcctctgccactgtcgacacacttgggagtgtttcctggagctcctcagcactccctccccaacttcctatggcctggtaggggtggggtgggggttgttttggaagctggggggaggtacatgcttacagattttttttttaattaggctgctgtcttaatcttgagggtggaaaccagccccctccctgagttggctgccaggtctctagaacaacagtccccacatagtccttcactgtgtctactctgacctggggggctggggaggggggtggcctgataataaagggtgcacaggacattgccccttccctttgttttgcatattttgcagcagtgatcagcatgctcctcttctcagaagggtgttcatgaagggtacagctcctaagaacccaacataccaccctccatttggaagctccctggtacattcgggtctgcctttctaccactggaaatggatgtttcctctccccatggaggagaatagttggcagacttggctaaaggtccttagcatcctggctggtgcctgtgtctgctgaggtgctccaacctcttccctggctggtcctccccaccacatcactgcacagtctagctaggtctaatggagggtgtcactcttgcatgcagacacacccagctaagacagagtcacataacagatgtgtttcagtatcactttaattgcagtatttaaacacatcactttgtattcagaaaaaatatctacccaatactctcttctctggaaatttctatttccaaccgtcattgaaaccaggatccctgttcaacccctctggaaagaaatcaacagcaaacaaggacctgggtcacccacagaagaggcagctggtgataagggttaggagctgatctgggctatgaccatatgggggtgcagagcaaggaaggggctcagggtgagggaggcagagacagaaaagcatctgttgggggactgaggcaacagctcaacccaggagtcggcaggagggaggaggaagccatggagatcagaggataaggctaggatccagcctcagaggaagaggatttttcggaagagtacaggtgagaggctcagctccaagacctggtcccatggtcctgcctactttgatccagagggagaaaaaagagcccaaaaagagtttctgtgtggccccagagagactagaactgagctgtttgtcctaaaacttgggaggcctgttctaggctccagccagaaaactgtgcaggactctgcaaatggtagagggggcacatggagctcagtggaacttagagaacaagggaggagctggtgaccaagtccacagtgtcttggaggagagatgagggaagtggttcaaggcaacacgtttttctggctatatcattacaagagagcaggtgcaaaaggttactttggtttcctcaaagtagagaaagaaaatacagggaagaaacggtaaaaatcaaagcttcctgggagaaaattgtagcctagaaaagctcatctttcccctgggggttcctgtattgcggcagagaggagggggtaggggaagggggtcctgtgtgagtgctgcaaggccatcagttgttcctgggagcttctccagaccttggctttcccccgtcacacgtttacccaaagaagaccagagtctggctccagggagccgaatgtgtaaaggacaggagtttacctgcccctcctcaaggtgtagggccccaagaacagcctctgaggtgtgtgcagtggggaagggttgggcgtaagagatgtcacctccagcatgggggtagcacgtggtcagatgcagagaggggtgctctctcggacactgcccagccttgccccacctagccgagtcacaattcggtatcagccaccacgtgttgtcttgctgaatggccgtttctggaggtggcctggccggtcccgttttcctgagcccctcggttcacactggcctttccctgagcctcaggggaggtcccaggtcctgagctatagccctggcctccaccgttttccgtgtaataagggtcttcgccctagacagtgtataaataaagtagcattatctggtaagcagggctgtgagacactggatgggagaggggcccaaacaggaagtgggggcaggggtgggagaagggggagggggaggtgggaggaaggatcggagggagggtgcagctgcatgtgcagactcctttcttcctgaagagtggtcagggttccagctcctagaggagaaaggacataggagaggcaccacaccatgccaccgcagctcggcagccagctcccgcgggaaaacgggcagttccaagaagggtgggatgacctccccagggtaggggacaggccagaggccaagattcagacctcagccttgtcctccctcatccagaatggcaaatggggattctccttccgtatacctccttttgagcaagggggcacccactgggcatttaacacggttgcaaatacagtgtggctgattaaacagcctgttctggtggccccaagctgaactatcccagaaaacataatgaatagatgacacgaatcatctgctaccacaccgagtaggtgggctggcaccattactgtcccctccccagtttgctacataatattttgaatcttccaccgattactgtgtgtgcacacatgcatatctttatgtaagctcacagaagggctttttctagtatttctcctcctgctccatgacatccactgaactccccagaaacccactatcttcctcatttcctttaccctggcccccagaactgaccagcctttctcctgtggggctccagctgcggcgattcatcaggaaatagccagtgatgcccaagacagccagcagggctcccgaggtgaccagtgcaatcagggtcttttgggaatagctctggtggcttgcaacatcttgctcagtgaaatctaggatccccagcttgaaaagaagacaaagaagatacagcctgtcacttgccaaaagtggagcccagcccgctccagccccctgtgtgtgactcaacagtgaacagatgcttgagggcattgacctcaggaatttttgaaatgggatttgagactgacgtctcttaattcagtcataccccaccatttttggttcaagactagaaaggagaagactcagagaaggatggtaggtagaactggggaagataatgacttccccccttactccagggagcccccctgccccggcattccctctcaggcccatcatctcagaggacttacctttttcaggtcagattggtgctttttcataagttggagtttgctggaaatttctagaattagaaacaagggttgctaaatctaaagagaaaccagcttatcctgctccaccctcccatgctgttctagaagatgctctgatggccagggtggtccatctcggggggaccgctcccaaagccagccaagtccttctccccagcacctgtggtctctctggatctaagatgccccatctccacccaggattctctaacctcagccctactccttccctgttcccccaggcagaggtgcaccttacctgttctgttggccaagaccagcagtagacactgaggcctcacctcagactgggcaaggagcagggagcatacctgggccccagcatcagcatcagcctgctcctccccacacagcactcgggccaggccctctcccctgtccttcttaaactccgcctgggaagacagagaaacatggagagcaagagatgaaattactgctctgccctaaactgcacccagagtctctgattacagtcatactcttaccccgtccgcaagaaggatccttgtttctaaaattccaacagaaaaaaaaaaaaactgctaactgtatatgtgcaacaacacaataagaaaaaaacctaaataatctcccaggaccaaaatccatatcttctagtatctaagatgttagagaacaaacttaaaaaaattgtctcgttgaagcattgcccatgtacacatatgcaaattaaactcaaaagaaatggccaaaaacagaaaatattaataatgcaataataactaagagaaaatattctgtttcaagattacagcagtccccaatgatggaagaaaagccaagggaggtgaggaggagagaacaaatctataatatacactcagtggaaacctcagtggcctcctccctctttctacccaaaggagtctcataaagtgcattgctcaaactgaaatggcatttttgtctcatcttccatctctgttttccattaaaagcatggaacccagttttaatgaagttcatagatttttcttcaggttgctgactgggccatcagacccaggaatttggactcagaagaaaaactctgataattcttcaatagtgagtcagaatttattccagcagcctccaatcagagtgtcctcctcccctgaacaggaaaggaattgaaactaagactttctcttcagtccggatggcagatggcagagaaggaaatgcctgaacagccctgacaactttcctgttaggggaaaactgctggggtgtgtgaccatcatcagaactgggtctctgtggaggagaaagcttcctgtttgcgggcagggccgctgcttgcaacaaggccacagggtcctcccagttggaatggagcctgggtattttcccactgctgtgacccaaggcaggaaaacccaggctcctttgctcctacacaaagcaaggtcaagattggcctcaggacccagctggaatttgaagcagctgagggaaaacaactgggcttggataaggccaggagagtgtggttagccaaactccaggtcacagagacacgagcccaaactggagcctcaaaaaacccccaggaaacaaggctacagagaaatgagttctcaggccactgctgcttcattcctcaggaaaaggagcaattctgcaggtctcccagtaagtccttggatagacgttctaactctggaaaaatccgtttttctgaacagcatttgaactaagtagtctgaatgccacactgaaccaatcaacagtctccacctctctaaacccagttgtctcaggggagccttacatggcttccccttgagcacccccgctccccagcaccgagagtctggatgaggaggagggggtttcttgcctggatgactctgggcttctgaagtatctccagttgaaataggtctgcttcccaagagaggcagagggacagggctcctgcaggttgtaaactagccaaaccaaatggcaccttcctccacctgctgagtgcaagaagccacaccttgacaatgtatcaagccctgaatataggacactgcgtgaaagcctctgtgcaagtgtcatgtgtatgtgtgttgtattcatgtgtcatgtgtaggggggtggggattgggaggtatctatgaattccaccttgtcaaagctttcagtttgcatgtacggcaattaaaatgatggatgccaaccaggcgcggtgactcatgcctgtcatcctagcactttgggaggctgaggtgggaggattacttcagcccaggaattcgagaccagcctgggcaacacagggaaaccctatctctataaaaaatttagaaattcaaccgggtgtggtggcatgcacttatagtaccagctacttggggggctgaggtgggagggtctctccaccctgagaggttgagtccactgtactccaccctgggtgacagagaccctggctcaaaaataaagaaataaaaaataaagtaacagatgcctatgatatccaggcacagttctgagtgctttccatatattaactcatttaggcctcacacgacctacgagattggtagagttattctactaattttgtagatgaagaaatggaggcgtgaagagactccagaggccagagctactgccatggtaagcaccataagaaaggtacaaccaaagtgctatggacatactaaggagcgtgaggacacgtctggttaaggttagcagacacatgtcactataggccttgaagaatggctggagggtgagcagaggaagccagtggggaagagcatttggaactgaggccccacctccaggaagcccaagatggggacagcatgcattattccacaaccctcatttcaaagagaatgaagaacactaccttctccctggtattcactatccttcaagactcaactcagtttctacctcctcaatgaagctggtcctaccttcaaccagactgggcatcaatccttactctgctctttactggattctttgcaagtcatgcaactagtctgagtgtcatgttcctcagctgtacactaggttgttgtgttgactaaatagatattgtatgaaagtgtccagttgggtgcagtggctcatgcctgtaatcccagcactttgggaggccgagatggacaaatcagatgaggccaagggttcgagaccagcctggccaaaatggtgaaactttgtctcttctaaaaaatgcaaaaattagctgggcatggtggtgggcatctgtaatcccagctactcggcaggctgaggcacgagaatcgcttgaacccaggagacagaggttgcagtgaactgagatcacaacactacactctgcactccggcctgggcaacagagcaagactctgtctcaaaaaaaaaaaagtgtccaatgtggtgttgagaatctagtgggcactagataaatagcagctgctactatcattattaataatagtaataccttatataccatatcatctagagtctacatattgatcatattctatgcattgttattgtcatttttctgtgactagattgtaagactcctaagtgtgtgttggggggagtgcacattatagcatttacaacccagactgcatgaaccgtggcaccaaacaaaagaactcagggaattgttgttcaacttaacatcccaaccagttggcctccacacagggtccctccaccccttgcacagtttcttggactagattcaagggaataatagcggccagcctcccactctggaatccaaccgcatcagtgaattgtgtttgggccccaagaggagcaggtggatcctgaacaaagcacaatgcttctccggacacttggaataaacatcctcccccaagagaggctgtgggcaaacatcacgggagagtgggcaggaggaagacacagcctcaccattttgttcatgagaatcagatttacaagctcctaactacatcagctcacacatgtttctctgcaaacacaataaacccatctaacctctctagagtagcattctcaaactttgcaaagactcttaacatcaagcattgcaatggggacggagatgggggtgagggagggacaggtatttttctaatgacctttaagatatttaagatattaagatcctagaacgctgagattctaggatcaatcatctcccccaaccccttttaatataattttatctattttggtgtgagtttgacaatgcaggtgaaaacgctattttcacatagaaaatggaataatgaagggacctgtttcaagtcacctaacaagtgggggcagctaacgaaggatgagaagtgagatcgtttccagattgcaggctttttccagtagacacaccatcttcataaatccttcatctgtaacttatgttttccgcatggaaactgacctttagtgcaagctggaggcagcctgcctcagatgaagtcaatgtgaataagagtaaagtgagctagctgagtaattacaaactctgcatataaacagatgtggtactaaagataggtatacaaattggcggacaaaggacttgactagacttttccccaaagaagatatacaaatggccaacaaacacatgaaagaggctcaacatcactaatcatcagggaaatgcaaatcaaaaccaccatgaaataccaccgcatacccattaggatggctgctattttaaaaacccagaaaataacacgtgttgatgaggatgagaagaaattggaacccttgtaccctactggtgggaatgtaaaacggtctggtggttcctcaaaaattcaaaaatagaattcccatgtggtccagccatttcacttttggatatatccccaaaaggactcaaatcaggttgccaaggagatatttgtacacttatgttaaaagcagtattattcacattagcctaaaggggaaaaagcccaagtgtccatcaacagatgaatggagaagcaaaacaaggtttacacttacaatggaatatcattcatccttaaaaaggaaggaaattctgacacgtgctacaacatggttggactttaaagacattatactgagtgaaatcaaccagtcacataacaagacaaacactatgactctactcatatgaggtacctagagtaggcaaagtcataggaacataggaacagaaagttgccagggtctggggagagcagggagttgtttcatgggtacacagtttcagtgatggaagatgcagacagttctagagattggttgtacaataatgtgaacgtacttactactactcaatggtacccttaaaagtggttaaggtgatgacttatgttatgtatattttaccacaattaaaaatattttggtgggtttctctggacaaatgggtgtagcataatagtataaagtaatcttacattttggaaactatttggggaaccacaaccacaaaaactaaattaagctgacactgctgccaaaagaatgacagttagactcaggaagacacatcctactaatgagggtgctgagatatggtaaaaggtgtttgagatgagagtggtatcaccttcccttcccctggctgcctagagatgatggctggggagcaaaaaaaaaagagtgattgggatagacatgtctacagaatgcacatacagaagacacgcctacagaatccacatagggtgagctaacatattggtactcactatgtgtcagtgcagaatgagtgtctggatagctagactcatgcacatatattcctgttatgggcatatattagatgaggagcataccaacatacatcaaggatgtgatgctcggggaaaccaaatccttcctgctcttcaccagggtattaggtagggcctgaggctcccaacattagaaccaataccttaaggccctctgacaccgaaagtacaaatccaacctaaggaaaattaggaggctctgcagcattcgcagcttttggaacagattgtttatcagacaagcagggagtagggaccaaggaaaggtcatcttggacataatcgggagctgtggctaaacattttggaacaggatagcaagctgaggataaattaccttggggagtagcaggaggctttgccgcatgggggctgaggatgaggagccctcaggaagaaaggggatcaacactggtggagagaccaggggaacaaaagcactcatatgagctgccacagagttgctttatgaaggggcagtgtggatggaagtcttctttggcataggaactggaggggagctgctctcttttcacatccccactcacagatactacctcaatcttagaggaacatgcagagaccttctcagctgtggcacgaagtaggccagacagcaaagaccacagcagagttaggaggaattatttctaaaagagcagtaagtttctggcacttttctcatacagtgacccaagttacatgtgagctttgaagagcaacagaaaggcaaaggctctgcagttaactctaaattccaggcacaaagaattagcattctggcacatacctgtgtgatacacagcaaaatgtatgctccaccaagtcgatggggttgcagggggaaagatcgtcattttccttggctacaactagcaaagaacttgacaattttttttctaatgagttgagttgaaaatcagcatcagaaacatgctgcatgttacttgtacattgtatgttcatgtttaagttaactattttgcagactgcatttagttattctactatgcaaactcatgtcttcactatttctgttgtttttagatgtcctaagttaaattctttcaggtataatttttacaaatttgtaagtcagagagacccaactgatgatcgtagtaaaactaccgagttagaatggaaaaaataagtaatttaagccctctacaggctgcgatctttccagtctatgcatgccagcacatcacatatgtgattcccttagatggatccccaacttgtaagaaaatgttttcttctgtaagtaaataccactctttccttcacctcatccttcctccagagccatgttactgttaggaaattagatttactgaaacaaagcaaggtctgccagaatcatttaaaataacacaattccctgtacattctttccaatgcagtaagacatgaaactgaaacaagaggcataactactaaacaggaggagaaaagcaatatattgtagtagataacaagatagcttaccttaaaattgaaaggaatcaactaaaaagctcctagaatcaataggcaaattcaagaaactggccaaacccaaaataattgttcaaaactctattaactttttaatctatcagtgacaatcaatttgaatatatagtgggagatctatgtgacaaataggcctatgacatccatcaaatctagagaaaaaagctaaagaaacaagatgctgagagatgcaaaagaaaaccagaaaaaatgaagaaattttagagcaattacaattcaaattttaaagcattttttttgcatttttttcaaaaagaaaaaaataatttacattttttacagtgtaataaaaaaagatctgcctgactggatattacaaatactgtagtaaaaacatacaataattttgaaaatttaaaataggcaaaagtacagacaaactgaacaaataaaatatgtctgaagagtatgccctaagacatataaaaacttaatataagctaaaggatacatcccatgcaacagaagagggagtcattcaacaaataatgttaggaaaaacggttacatggaaaatataacattacagcaaaataaattctatatggattaaagagttacgtgtaaatatttaataataataaatgaaataataaatgaactgacattttaggtgactagtttatatctggtgagtgagaaggactttcttaaccaaaaagcaacttaaatctgactctctcagatttaaaagtactacagaggaggggaaaatttaaaaagtactatagaggagggggaaaaagtactatagaggatggaaaaataacaaaatttattaataattaaaattgttattgtcttttttgcccaccagatggggcctcttactccctaaacagaaagctcagtattaaaggcaggctgaccaagctaaactccccggacccctactcaaatccagtgcaatccaagaaggtttaagggtgttcagaagggatggaggaaagggacaggggcgggaggaagaggttgggtggggggttgacttacacagctggaggtcttattttgctccaggcagatgccctgagtcaatttcacttctctgatgcctgaacatttgatttctgcctgtattaaaacaaaaacaataacaaaaacaaagtaaataagccagtatctttgctcctcatttctttcccaactttttccagtttgctttctgtgaggtgctctcttaggaggttttaaggaaaaggacatttaaaatttgtcaggggactagagatttctaatagtcatactctcgtctatttcatatctatcctcatcagatgacaaaacttttgttactagcctgggcttactggcaagcagctatttgcaaccttggtaaacactggcttggatggtgcaggactgggagaggggaggatcttttcccatttgggttgttttctctccagtcaatcacaaacttgcaggaaggccatataggcaaacagggataatggggtggaccagcagatgctggggtacctgttttttctcctggcctccaggactctccaaattcccattttggctcttttatttatttatttatttatttatttattttgagatcgagtcttgcccaggttagagttcagtggcatgatctcggctcactgcaacctccacctccctggttcaagtgattctcttgcctcagcctcctgggtagctgggactacaggtgcatgaccacacccagctaatttttgtatgttttggtagagacggggtttcaccatgttgcccgggctggtcttgaactcctgacctcaagtgatctgcccacttcaggctcccaaagtgttgggattacaggcatgagccaccacgcctggccctggctcctttaaaaacagaaagcagaaagatccctcgggcatatctcatgactgaggccctcatattttctgtcctgcatgctgaaagctgttgacagtcataggccctaaggctgagaaggccaggctgagctcaccatccctggtctgcccagttcctgccattgccaatgcccccctttactgcctctctgtgcctggcacaaccaccaaaccctctcatgtagaggaaatgttatttgtcctaaccattgtgggagaagcagccccagcaaataagcaatagttgccaaatattcccaaagggaaatggtgtcctggtcaaagccccactgataggtactagaaagaaccagaggattggatggatctctgagaatcccgtttactctctattccctaaaatgcaatacccaaagcctggatgggccttaccacctaactctacccctttcctcctctttctacttctcccagcaatatttaaactgtgtatttccgtgctgattcccacatgacccaaatcccactggcagggatgaggagaggggtggagggaaagaaacagcttgcctgcatacatatgaagtgaggggcaatctgccatttttggcccaattcacccaccttgatgtcacttaggataggagaagatgatgtatagggtttagtgggagatgttgcaaggctagtgctagtggttgaaaggtctgaaacatttccaggtgacaggctaggcttcaaggttgtctctggagttgaaacgttggctggggtggtgaacactgtgctgattacagaggtctgtgactggacagaagagtttgtgtttccataaactgaggttatcacagaggtagatgtgaatttgactgtcgtttctggaagagaccaaaacatgggtgtgcatgtgtgcatgtgctcatagatacacaaaatctcaggtcatgatatgggcatgcacttcaacacagaaaagggagtttggggagttaacagttacttcgtgtcccatccctgaccaaactcatttcaagctgttggaaccagagctagaatctagaatgtattagaggtgtcctgaaactgaaatagatgctggtctaccttagagaagccaaagacccccagtttggacctgtacccaccttctttcctttagaagagatcggagatctctattgagtcttctgatccttattttatcactaagctagactcagcatgagagaaggggtatggaggcattactgatcaggatcagctcccaagacatgggcctgagaaaactgtcactgaaggaagaattatctagaacttacttcagggcaccctaagcatgatactcaagtcattaatactagggacttgtataatttcctctgtggagaggggagcggtctgaaaacatcctaaatgctttacccaagcatcaccagcatctctccgggatctgacacaaatgctgtttttacctgtgatgtttgttgtggcctcattgccatgttgagacacagggtgcaggctggtacttccaagggtactaggtgttgtagtttcttggtaggatacatttgtagaaacatttgaaaatgttccctgggtaggtaactctggggtagcagtaccgttgttgtcaagactcatgaacccagaagctatagggaaacgaggaggaagaatcagaacctaaagatatcagcctggtgatatcacctgatgcaatttcctgacttcaggtagaattcgtctagaacattccctgctgccccttgttggcagcaacaagaacatactcctggacagtggattaatttcccactaccaaatttgccctgaggacatagggaaggaaagatttatatgcatacaaatgtctcatacagtattatttataggagggaaacgtgaacaactaaatgaattatgataggataagtgatatatgcacttaatataccataatcattatataatcatataaacaaacattagaaagaaaaaaattataaaaactgtagcaacgtggaactatgaggtgatgttcatagtatgtttagttacatactaaaatataaaattacacctgcataaatattgcaaagatctaatgtgtgcaaaaggtcatgcttcttttttcttttcactgtatcctcttttttggtcactctccatccagtatactaactcttggaataatcactagactcactgtctctatgcgatccccttaaaaatctatacttctcagacttcccattcccatactcccctcatccttttgctcatggccttcaaacccattcgcctttccttttcttcttttagcatgctctgacctaggaattcagctaatgaaccagggaacacaaggtctggtttctcatcaatgtagtgggaaggtagacaagctttgttctggctcttccaataactaaccatgtaatttaatgcatgtatgtatctcagctctcttacctcttaagtaagggtcttttctggctaccttacatggattgctgggataaacaatgagataacaaatgctaagttattatagtattatagtataatgttttggatctcatttttctctgaagatcttcatgagtgtctttgcacatctcttctgtatatcctgggatacatactttttttttttttttttttaagacagggtcttgctctgtcatcacagcacccaggctagaatgcagtggtgagatcatagctcactgtaaccttaagctcctggcctcaagtgatcctcctgtcttggcctcccaaagctctgggattacagatgttactcaccattcccagtcagtatcctcattagacacaggaaggagaagcttcttgactgaaccctatgcctcaaagagcccacaccctgtcctgcttcctgtgaggaccaatcaggatgtaccctctcttctaggtcatactgtggggaccagaagtcctagcacttcttgatcaaatggcactttgctcacatccacgatgggccgcttctcccagtccatcctgctaaggggaactgcagcacaagggtgtacacccccaaggcccagtggtggccaaatgatgactgcttgcagggagaagagttagtgcttagtgcttaagcctgtgggtggggtgtcccaggcacacatgcaattgccttgcaatgtgagccagagtcatgggtagaaagtagatgaagggaagtgggctggggccaggagccatctcttcctgctaagctgcactgtggcagtgaattccaagaatctgagcatcccaaattgaaacttggccttccaggtgatcacgaagatatgtttgtcaaggtaagaggatagaagatattttattagttagttggcctgacttacaaccttgaaatgtttagaaatatagtatgtaggcctctgttgtactcttgccttgggccttgtaaatgttaagggtgaacttggtatccagagttcataaaggcagttgcatcttcaaggaagagcctctgagggtcccaggccaccctaaagcttgtctctaaattttcctgattgggatctagatctgtacttttcagcgatttccaggtaaacagcaaggtagaatgacatctcttgtttccctcaggatcaagagggaagttagacttttggcttcacggccatcaacctggggccaagaacggtttccctaaaggtgatgacaagggtttcactctctcatatctgcttccttccacaacctgctgcaagcagattgctattaatggtgactgcagcaatcgtgtcttactgttatgtgtcaggtaagcagtggggagaaggaatatcactatctctgtcttagagatgaagagcctgaatcaccaaggtgctgcccaaaaggaaggccatagttcatgaagggaagcagcaatggaacactgacgtttagctgactcttgagtagatgcaacaaggaggttaggctgggtctaaactgccaaaaaatcggaatttattccccacatctctgtagagaaaaggatgggctcccatctggcttaaacaggaggtgggttgatcaaaataaattgatgcagaagccaatccaggcttctttcctgtttagatgggaccctctcaccactctgactttaaggtcagattcatctgaattcatccaagggggcagtattcagacactgaattaaaggatcaccttctcaagacaccattccaagactcctcttcttgcctgctctcttcctcttcgcccccagcatactgattactggggaccccatctggtccaccctggcccagcccttttctctctccagaggaagctgggcctgactgagatgatgtcatgcttttgaatcccctcccccgaagggcctccttcacctagacaaacacttttgaacttttccagatgtggagtgagacctgctgctagttctgaggacagaggtgcctgttccagaagagcaaagcaactctggacccaagccagctactgacccactggggccaggctcgcagctgcagcagcccctccacccaccaccaggccgagcgctgtggaatgagtagcaggatccacctgcaaatgagaaagggaccccaacttcagagtcagggctctgaccccagggtgagcagagcaccctctgagacaccagggggacaggacaagtgggagggcagaaagaccaaactgagtgactggaaatgcctgagctggtgcagagcaaggggacaccttagccaggggcctggagccaatcctggcataaacactgcggcacagcagggagagtgcatcttttaggttcacagtctctagagccctggaggaatgacatttatgagagtcaagactgaccacagatctctttttatcctgtcttcccacacacatccatggcattaaaccatcaaacactgacctttctttatctgaccttctgactcccaactctgtaggggagtagcaggagcctaccagtcagtgagagcttgtcacatcctaagagacaattgatgaaacctccactctttttcattctagatgggaggaacggtccctacccacaaggctacaagaattatagtacaatttaaagttgaataaaaagctctcttctgttgtttacttctcagtccatccttattaactgtgtttccctagggactccatttgacccttagttactctagttgatctcaacttatgaactgggagcaagggaggagacaaggtctcaagaaattagtaaaatgaggattctaagagatgtcacaaaattcatgtagtaaaagtcatacactgaactttcaggtacttcttcagagtcaattattcttgttttacacataattctaataaccctggttatctgatatcctagctaaagttgaaacgtaggaagagcctattagaagcaaataataaggagaagcaacagctgaaaactaagaaacagaaataaatgaaaagcagacataagtatgaaaactcacaccagttttcttgaatcatttatggtaggagtgaataggttagatatctataccttaataagcattaatgatgtcactgagttgcaacatagccacgacatgttcatgatacatctgagtcataaagtccttttcgggggggtattctaagaaagcaaagacatgtgcaatacattttgaaaatatttctacctgccactagtaaattgaagactcttttgttctttaaagtgagtttgcaaatcctcagcgatccagaaagctctgctaccaaaataactaaatccccatattttaagagactgagttttcctatacttggtcttgcttttcacagccctccttagttttttcctggtgctgtttcctgatctcctagcctgccagtcttattttgcccatgctttcatattctagcacctggatcaagaggagtatcttgaaggagttcctgggaatcttagtccatagagttacagaactaggatgaagggacatgccagcctctgccaggaagtaggccgttgggagccacagactgtatcaccaggaaggcggtatagcccagagacaaagagctcaggctctgcagccagacaggccacattcaaaggcttctttaccatgttttagctgtggtttgggaagttacttcaactctgtaaacctcacctgtaaaacagagataaaagtagtccctatgtcttagctgttttgaggaacaaaggagctaagaagtagaagcagttatcctgtctggtaaaagttcaagaaatagtggatatcttttgttttaggccccttccttctgcttctcagtgggcatgagatacttatttctgtgactcatctgccacaaaatcatatatgctgcttcctcaggataggtctaactgtcacctcagtaagaatataaacttctaaagtgctggagccattcttattcttatgtgttttactcctggtgcttagcacaatccttggagtttaggaaaagcaataggattggaggacaactgtggcaggtgtgttcctgccagctacctctagtcatggcagtcttgttctcatgttatattttaagggggaattaattaaattggggagtgttcatgtgaagataaccaggattaggagagttctagaaaccaagtcatattgttgagggtctagtgttatttcatctagatggggggttggcaaactatggccagtgaacctaacctgactcaggggttgtgtttgtatggtcagtcagtaaagaatggcttttacattcctttctttctttttttcttgagacagtctcactctgttgcccaggctggagtgcagtggcacgatcttggctggctgcaaccactgcctcccaggttcaagacattctcctgcctcagcctcccaagtagctgagactacaggcatgtgccaccatgcccggctaatttttgtatttttagtagagacggggtttagccatattggccaagctggtctcaaactcctgacctcaggtgatctgcctgcctcggcctcccgaagtgctgggattgcaggcatgagccaccgtgcgtggccggcttttacatttctaaaagtgtcgtaagataagacaaagtagaccatccatcagaaaccatatatggcccctaaagcctacaatatttactctctggccctttatagaaaaagtttgctgacccctgatatggaaaagaagaatttggggaggaaaaataaataactttctttaagatgcatgttatttacactggttgagcacccctaatctgaaaatcagaaattctaaaatactccaaaatacgaaactttttgagtgccaacatgatgccgcaagtggaagattccacacctgacctcatgtgacaggtcacagtcaaaacacagtcaacactttgtttcatccacaagtttattaaaaatattgtctaaaattatcttcaggctatgtatataaggtatacaggaaacacaaattcatgcttagacttgggtcctattgctgagacatctcattatgtttacacagatattccaaaatctgaaaaaatctgaaatttgaaacacttctggtcctaagcattttggataagggatacattcattctgtgtattcattctcatttttctgcagtgccagtgatgtgcaaaggatctcgctcagtgctgtggagagtacaaaatgagagctggatctctttcctccattaggtgttagtgtcattgtcatttaaatcaatccctcaaggagtttgtaatctagtggggcccactagaaacatcttcaggtattgtcatgaaggaccagattaaatctgtaccagcccaaagaatagaattagaactaatgattagaagttatgggaaggccaatttcactgcaatccaaggaaaaagtgtaaaatgatgtagctatttataagaatgaaatgagccactttgggagataagtgatccatccatgcttcctgcaaacactcaggaggcatccgtgttagggggctgtccaactctgaggcctaccatgaatttcagtcatcctagactagaacaagggactgagcagatgccttcttaagcttcaaaggctaagctaaggtgtgagtatatataaaccaagggtctgtggcctgagggttcccagtgtaccgagatttctgttttatattcaaatagcatgtcttggccagacaccatggctcacgcctgtaatcccaacattttgggaggccgatgtgggtggatcatctgaagtcaggagttcgagaccagcctgaccaatatagagaaaacccgtctctactaaaaatacaaaattagctgggcatggtggcgcatgcctgtaatcccagctacttaggaggctgaggaaggagaactgcttgaacctgggaggcagaggttgcggtgatccgagatcacaccattgtactccagcctgagcaacaagagagaaacttcttctcaaataaataaataaataaataaataaataaataaaatagcatgtcttggaccccatccacttactgtggaaccctaattattttgaagattctctgggcacctacatttctccctgtcacctcttcctccattttaccagcaccacagactcctgggttgtggctccatggctcaatggctccctgtccgcactagtataccacttcaccgtaagttagccaaggtaaagtaagttactttaccctccccagagagccactaacacaaggctagtgtgtgtagccagtatttactgaaaggttgagggcatggaacgagattacagggcagcccaggggagacaatggcataaccctgaaatattagacattactgtgctaatgaagccatgtattaaaaaaaaatttcctcccaggtcttttccatcctccacccaccactgtcctgctatgactccaggcacctctccaccctttatatgctcttcctgggctctggagtcctatcagccttgtgtctcttgtgcccacctaaacacaaggcttcacttcattttatcatgctcagcaattcagcctcctgcctacctttgctcatccaggattgtctggggttctaggctttgtcactcaaagacctcttaagacattttcttaaatcagctgcctagggatgccactcctctctaagaagtatcagtttgatttcatttttccaaataaagaagaagcctacttcccaattaagcccaaaggccttttccgttgcatctgaagggaagtaactcattccgacggactccaagagcacaggtactaagaagtacacctttatatgcatccctatttgtttgtctctccatctttccaacatgcacgcatctttctccttagcacaacgtccagctctgggactaaaagtcatagataatatgttttcatttattagctaaggagggaagagaatgttctcattagagaagtccaagcccacaaaaatatggaattctcacagccctggcgactgtgagaattttcttctggagggtggtgttgtgttctttttccataccttcttatttttaattctccacactgcaagccatttagttagatcaaccaaagtcaatgagagagggaggcccaagtacctgagagtggagttgggtaaccatccagccctgaaagtaaacccaggccctccagctcagggtctaaaggaaatcaggcaatgagaccaacggtaagaagtggaatttgttcctcattttcatttgttttcgtaggactctgcagctgagtttatctgctgcagtttggcacttcttgccctaagctttttgagacaaagattgcgaaggaaggagatgaggacaagggaatgaggaggcccaggaggtggagccaaagggataagaaaaagaggccccaggcccctgtgtgttttatcagccgaacagaaatgctgctgaagacatgcatctgcaaaggtggtgccaactgggttgggtctacaagtgcggagcactggggaccactgaattagtcagaggtccccaagcctgctcctcctctgtcgccatatggcagagattcaaagggtggagtcctctcccctctggaaaatagctgataaaattcttttcccttttatttttcccctcttacatgtagccctggacaggatatgggtgtggggtcagcaggcacgaaggacccaaaggaagaagaggaatgtgacggggagggcctgggggtgttgttagagtgaggatagggacaggccttggaaagcttggaggaaatagataccctgagcctgacaaaggggttccctaattacctgaaaggcttcctgctccagccagcactctggcagtgctgcctggtggcccttgagccccttaccctgactctgctctgtgatctcccccacttccaacaaagacagcccacttctggttagttgcagtgcctatgcacatgccaccttctcaaagggacagaaaaaaagaacttcccaaaacaagctctttgttggggtaaatgatgagaaaacaaaccacagaaatcccctctaccctaaattttacaataataatagcatttctgcaatggccctatggtagcatttcaaggtacactcagttatctcatttatcccacaatgtatcccaggactgaaaatgactcctagtattaacaaaacaaaacaaatccaagcaaaaaccctagaaagctcttgggaagggcataaaactacaattggctcaagtagtctggcaaggctgggaatggggccttgtgcctcatccctccccaccaaaagctgggatattctcagcatatcagtccaaagttttgccaaggttgtgttgctcccccaaccccaacctcggcaggccaaggcgagactggcacttaccagctgaggaaataagaaaagggtggacctcattcggctgaggaccaggtcatcacaagctgtgtagccaaaggagaatggagcatctgattggaatctgcaccactggccaactcacccctgtttttttgttttttgttttttgtttgtttgtttgttttgagaaggagtctcgctctgtctcccaggctggagtgcagtgccaggatcttggctcgctgcaacctccgcctcctgggttcaagggattctcctgcctcagcctcccgagtagctgggactataggggtgtgccaccatgcccagctaatttttgtaattttagtagagatggggtttcaccatgttggccaggatggtctcgatctcttgacctcatgatctgcctgcctcggcctcccaaagtgctgggattgcaagcgtgagccactgcgcccggccgactcactcctgttatgagggcctagtctagcacccactctagaattttgaaacctcattgatagcttttccttgccccaaagcacacatccaggactgccaaacagggcaacccaaaacttctctcagagcttcctccagcccaggggcagctgtccccagctgggcggacccaaagatggacaacagaggagactgggaacaaagaggtctagtccaggtcactctgcagggccacagtgggtggcccttaggatgtagtgagagtacagaattgggagccctagagtgctgtaagcaaaagggagagcaatgtacaaagtttcaaaagtttcaaaccttccaagtgcaaagagatgaggtggagaatgtcattccccaaggaaagtaatcgagtataaatatttaccgggtgcctattttttttttaaccgaagtgagagcaagaccttaagagtaaggatatgtgtaggtgagtgggggcagtgttctaacccatccactagctttagaacttggagcaggggcagaggaagaaaactccaaaaggtgacaagttttgaaatttgtgcaggggtgacggtttttggtaaggcgagcgaggctgggcgcagagcaaattctgtctacttctacctcctccgcggtggggttgctgaagtgggaattcaaactcagcttcccaatcttaaatgcaaggtttttgtttggttggttgtttggttttgtttttccttttcacggactgttcattccgaacacccctggcctgggacctggagcctcatccctgattcgcttccctcgaattccttaatgtccacttctggctctcccagtccctgtgcaaggtgggcacaccggccccttcccagcaatccgctccgtgtctatactttctgaatcaaccaagagccacaaaacttttcctgcttctctcctccccagtctcccggttctggctgcaacttcgcactccgcgcctctggcaaccagaagagaccctggcatctccaaagcgctttatctcagtccattggaaccagtcgtgctgaccgattcacacctcggctaacgcacactcgcgggggtgatggccttcccttcccctcccacccccgtcagctcccaggtgaggcgctggccccggggggaagcagctgtgggcggcagtgcgtgggttgggcaggggtcccttccctccgtgagactctgctctgctgttcagcctcccagaaagcctccaccctccccgcggcgaagccaagcggccgcggcgcgcgggcggtactcacgcagcaaactcagcaagcaaagcgcggtccagccccgcggcatcctgggccctgcgcgcgcgcccctgcggaccagcatccttcccgcgcggctcctagagagacgcaccgagtggaagacactactcggcttggccaggacgcgctcttcccgccccctccgcccgggagaggggtgggggattcttgcttttttcctctcttctcccctccctttttagtcttggcaaggcagcgcctctccttggctgctactaacttgagctcccctggttggtcccaaaggcggagggcgttaggagggaggctgggttgccgccgtcgaggccaaaaaaggtggaggtttgttcgggctccagatgcctcgttcagctttctggagaggccccatcccacttcttcaagctccacttccacttaacttttaacccctttgtggcagccttgccggtggccagggcaggggcaagtttcctccgattttttccccacttttctttccttgtgattttcctttatttttaagttgtaagccagtaacaatcttgcaaaaggaatctactgtaaggacctcagtttagaagtgtgagcatttcgttaatcaggtaaaacttaaccacaatgtggcacatttagtgatagcctcaccagatcctgtgctgtgtgtgagtgaagcgtcaggagtgagcaggtatacgtgactataagtattcattttggctgtccaaaccattcttggagactttttctttcttttcttttcttttttttttcctgcaagacctttttgtgttatgttaactttttgctaacttgtgttaacttttcctgtgaccttccatatttccccatttagttccccatcaccatcatcctaaagaaaaaggacttccctggatgccttctccccagttatcccctctccagccctgggtctaagccactagggatttcaccttgctctcccatcagaaaaaggactttctgtgactccatcctccaccacttgatagatccttgagcttcctgttcctcaccagttcctctgggtgttggttgtactgaatagaagaaactctgagccgggtaggcagcctagtcttggggacgtagagacgggagaaaggagaagccagcctgggcagatgatggcaccaggggaggatcagataaggtataacctgggagaggctgctctgatatccagagcagaatcatgaaattataaatactcagttcaggctcttccatgatgtctgtaccacatagcctaaagggaaaaaagagaagccagaccagcactctgtggtcctttctgatttctccgcagacactctagcattataaaagtagctttacctttatagtccatctcaaacctactatgcgttggggttgcacaggagaaggatccaggtctaaaaacaaacccaaaatctccttattctggtcttgttgcctagcattcctttaaacagggaacaaagtctttcatcacacaataagagcaaaggcctgatatgctaatttgattgaatacaacggaatggtatgaatctgtttcaaagtacaaatgatgattcagaactgatcacatagtgatggcaagggcctggggacagaaggagtggcaaacatgcattttaaaatcagtcattggtccttgggactcccaattaacagggaaaaggagttagttccaacactgccaggccccccactcccctcaacttcctcagctccagggaccgctgggtctgcttcaggcatccagtgtgcagttgagaacaaatgtggggttgtaatccctgctagatatgaaagctaatttggtccactttaacttccatttccagattttttttttctggttactttaaataccatttgtctcccatagctggaccacgggaaacaggggaaataacttgtctttctttagtacctgaacttcttaactagctttgggagcaaagagagagagaatgattctgtggagcagagttttctcaaagcatggtctacacagaatcaagggtgagggccagaatctgtactttgagtaagtattctccatgactcatgcacactgaggttcaagaagccctggtatagaaagaacacttgctgggtacaaggagcaagggcgaagtggatgtcaggcttcagggaggaaaaatagaagtaggggatatgggaggctggcaaatcccttcctctgagagaccagagctgtttcttctctggcttgcaaaggttatggatagccccagaactacaaagctagacagtgattggccactcttcatattttccagggtcactgagactcatcaccccaagcacacacacccttgcccaagccacccccaaacacacgttctggccactggacacaagggtacccagggaccccagccttacatttcctcacaggccaggtagagttgagctatgtagtctcttcaaagttctagcctttctgggctgctcctcaattctctgctctcctgcttcataagctgttgctagaagatgttagctacaccgcacaaaatggaggatacaacagaaatacactgagtcagaggctgtctcaggccctttacagacccttggaggtcacaaccacttttactattaaacatcccttacctcacccctccccaaaatacacacgcatcatgtcaatcaacctaaaagaggacctcatcctatgtcaaatatgtctgatgttaaaaaagtaaggaaaatggttgttataattctgaattttaaaatatattcattttgttcttataattcaaactttattatatttacatgaaactatgaaagagttgaattgcagtttacaagttgagttgacatttttgtaggcatttaatgaaaaatttgtgaattttgattttccaattttatattttggaaccaagacttttttcccacattgcaaacttttttttttttttttttcagtttggcagggatccttagcggtagaagtgttcagatgctggactgatgcagtgacaacctgcaagtcccttttttcctctttccaccttctagtctccctccagtgcctcctcttggcagaacctaacaagaaatcagctgacaagggagtctgggaaccagtgtcctgtggtaagtcaccatgatgcaatgtttgcctccatgataggcaggctattccagaggccacagatcaggaagactcagaccaaattatgatgatcaaatcacaagggttatggaatctatttaaagcatagagccagaaccaaggggacagatttacacaaggttgatacacttgggaatgcaagcagggcaaaagtcctgcacagtctcacagcctcagtcatgtgtttcgctctgcagtggtatagttatgaggaccagaactgagattgagtaaggggatcaatatgaggaagatgcttagaaccaaggtatactcattctattgagagatgtttaagggtaggtaggcttggccacaggtctttgtcagtgttctgggaagccatactttttgccagtatttcttgggtagagcttatggggggccagaaggtgccaccagtaggtagtcaatttagggatgacatggacaccagccagaaggtggcataatctatacctcatggcttatgatttgttttttcctatccttttctgcctgtaagtagcactcttgtttgttccatccttttgtagtctattccatttattctgttttacatgtcttgcaggttactaacttactatagattgagaatcccaagtctgaaatttgaaatgctccaaattctgaaacttttcgagtactgacatggcactcaaaggaaatgctcattgaggcattttggatttcagatttctggaatggggtgctcaacatataagtgtaatgcaagtattccaaaatccaaaaagtatcccggataagggatactccatcctgcatttttagcacatcttctgaattctgcctatgtctcacaaatgacttgcttactttgtatctatagttaatacatctgatgagtttcacccacctgcttttcttgtcctctgtatgaaactgaatattctcatgtaacagagcaaacacacattgtagccagtattatagagaaaagtacagaggagtgaggttggggctgagggagacaaaataaataactagcagaaaaccagttttatgtatttttcatacagctaaccattttcctagttgcatttactgagtagtctcttctttcccttctgacctgacatgccatttctgtcatgttccacatttcatacgtatgtgggtctggctctaggctctctagcattggtcagtatggacaccccaagtgccttcgccattgccttatttactgtagcattaaataagttcagacatctgtagggcaagttttcctctcccaaattgtcttcagaaatgccctgactattcttggctctttgttcttccaaataataataataatatacaattttataaatgcttatcagatttccttccaaaacagccttttggattttgatcaaaattcctccatagatcaacctggggagaacggaatctttccttcagagaacttggtatatatctccattgtttgagtcttcattaaagtttataattttccctgtaatggttttaattcattcattattgttaagtgataaattcatttaattcattgttagatttattcctaggtaatttatgtcctctaagactatggcaaatattatcttctttttaattatttttgttgctggtgtatgaaattgcaatttattgttttatattaatcttttattgagctaccttattaacttatcttattagattgaagtatttctagattattttgggttttatatgtaaatgatcatatcacaagcaaatagtgataattttatgtttccttcccaatccttctgcaactgatttgttttacttaagttaatatactggcaagaacatctaaggatagaaaggagtggtgatcatgcacatcctcacctcattccagattttgaagtgtaagcttctaatgtttccacatttgcttaattttttaaatgtgctttttatttatttagttatcatttttaaattattattttatcttagagacaggggcttgctatattgtccaggctggtctcgaactcctggcctcatgtgatcctcccaccttggcttcttaaagtgctggtattataggaatgagttgctgcaactggcctatatgtgctttttatcattttaaggttattctcttctattcctaattgactaaaagatttttttctttaataatgaactaatgatgatttttttcaaatgccttatctatacctattaaaattacatatggtttttctcttttaatatggtagtatggtgaattacatttgtagattttctaacattaaatcaactttgccttcttgagttaaaccaaactttgtcagtgtattatcttttttatacactgtagaatttaatttactaatacaatcttctatttatgatttttgcttctatagtcataaatgaaacagccctgtaatttttccttttcttcttgtcatagtctggttttggtattggggttacagagtccatataaaatgagttggagagtatttccctttttttctattctcaagaaaagttttttatgagactgggatgatcacttccttttaagatttgtgggaacttgcctgtaaaatcatttgggcctagtatttaatgtgggattatttaacaatactgcttgcatttttgtaattgttgaattctcagatttaaaaaaatttcttcttgagtacattttgttattttcctaggaaactgagtatttatcaaacctttcaaattgttgttgataaaattcctatttgcttgttaatctgtactttatctagagtgtgttccctttttaatttgtgctattacttctttgtgaataatttgtcttaatttattacagatacttaaattataaaagttttcaaattacttacatgtatatatacatatgttaaatatacttatatgttacttccaatgggttggaggtgattcttatgttgtgaaaacgcccttctcttgcgcttgagcgggtggagctgtttcttagaagggagtgagcttggactgatcaaccagtgcaaggcgcccaagataatctgttggtgtgtttcatagaccccttgggatgttagcaaaagcaaaaatgtaatgatgttcagaacagagcagtaaaatgcaatgccttgtgtccccctcccctccaagcataattctagggctgccgtcccagttttgcctcctaagggacaaccttgtgagtgagtgagaaagatgtggtgtttcagctagactactacagagtccacagcttttctgtcattgctacagctattaagacctagtgacctgaagccaagagcggtggttcatgcctataatcccagcacgttgggaggccgaggtgggtggattacccgaggtcaggagttcaaaaccagcctggccaacatggcaaaacctcgtctctactaaaaattacaaaaattagctgggcgtggtggtacgcgcctgtattcccagctacttgggaggctgaggcaggagaatcgctggaacccaggaggcggaggttgcagtgagccaaggtcgcgcctctacactccagcctggctgacaaagtgagactctgtctcaaaaaaaaaaaaaaaaaaaaaaagacctggtgatctgacatataagtggggaagaaaagcatgtcacagtatgacgctattttgttgtggcagaggtaaaaagtcagtgtcagtggtaatacatgtctcatatacacacataatgatttgtctcagtgttggaagtgtgggtaattttcagtttcgtcctcactccagtatgcaacacatacatttgtttttcacaataaacatgtgctacttttacaaacaaaaatacataaagctatatttctgtgaaaaggagaagatgtggcaattatgcattaccgtagttattttcttcggatttgtcaggtcctgagctgtccacaggagctgtcaggtgacaggggaaacagcttggccaaagggcgaatatgtcagcgataagggagacttaagtaaagattccttacaccctgggaagcagctccctgagaacagctcagaaatccattgtttgtggatttgtgtctgtaattctggtattgtctctgctcatttccctctgtagtagctaagctttcagtcaatcttcctgatggtgtaggcctaactcaacattgctcatgaatactaccgacagcatttatacctccattaaagccagatatcaaagggggttcaggttaccctgggggtgatgttgtcattgattcaagaaaactccataatgaaggatttattcaggaaaacaaaaatagaactactttgcgaaaggtccttccccacttggaaattctctttctggtgctacctaaaggtaggtataggaaagcaatcttttttcactaaagtgtccaggaatctgtctcaaggggctggatcttcccgaacccaatattgcatcagttcacggcccaacaggctgtgaaagccagggacttaacagcctttgtctctgtaaacccaaatagagagctttaatggcatacatcttacggaagccaaagcaaagaggatggctatttttaacttgaggcaggaaaatgtggctggaaaggaaacatctgtcccaaactattctcttgagctttatacagaggtcccatctatcatgaagccatcaaaaataaaataaggtgttggtccaggcctgggtccgaaagaaaaaggcaaagcttccctacgtcacatttctcccacttctaggcttttgagttgggcctatggcctggaagagaccacctcagaggcagagcatgggggcatggctcaaggacaacctaattcctgtgaattttatggacccctcctagtttaacatcttcatccaaaatggccccaccctttaaggttcagattttgcagactctccagccaggagccatcagaggtctagtactaggagagtaagacattctaaggtctcggtgctaaggtctcaatttggaaattaggtcttgggaccttagaaggtcttatacttctagcaccagacctctggtgactcctgactggggagtctacaaaatttccttggcagttctggctgttggtccttgagcagagaagccattctttcttccataagcagcaagaaagttccttatttttcaaagacacgccagtcacctgtgtgtctgactgaggtgacaaaggggcaagtgtgagcctaccaagcgtcagagatgtttttgcctcagtagaagcactatacatcattctgagcacatagagcaaggtcaaattcacccatcagaggctcaggatgaattaagtgttggaggaggtagggttgcagcagatagtgctcaggttgtgcactgcacaaagccaggagctccatatagactggaatctatgtctattcacatagacagcagatggagaagaggagaagcaagacagtgtgttgttggctcaggtggttctcagtctttgtcttggagaactgatcagaatattcatggtgcagttctgtgttctttttcccattttctcttcctctttttctttttatttgattttttttctctttcctgttttcagtcaaagatttggctaggagaagaacactttactttttttttccaaattgagtagagagttgccaggagaaatgacaaggaaagaataagagtaaaagagcatgtagggatccactccctccctctctgggtgtactctctgcagagcagtgtctgagcagcagggcttggagggtgtgaaacagggttgccaaattgcataagtctctaaaaagatccatatgtctgggctctaccaagcctctgagctcagggagggggccaataacatcatctgctggatgggagtgcagttctcttcctctggggaggattagatgtcagcttgaatagatgctgttaggcttttgatgacccagattgggaattcggggtgtcggtgtttggggaagggaggaaagaagaggagcacagagcagagcaaataggaaagatgaagtttgtaagctagagtctgtgaaacattgagtaggaagggagtttaaaaaccctgggacattgagttttctttgaaattttttcccatgccaggacatttttggggagccactgtgcagatgaatgccaaaccatttgcccacttcatggggagtctagactctttattcccacaattaactctctatagacaagggagagctcactgtcttccccgccacttcttcaagctctaaactatagcttcctctggggtagagggtagcagatggtgtacagctgtgggacacatctggtcttgcggggatcagaggaagacacagaggccagttgaaatcccagtggctaccctggaggcctgtctacaaagatcaggggtggtacccctgacatctacccagatcccatcttgggcagacttcacatttttccttagtcccccatgcctcctctctactccagctttaactgaattacagggagatgattttgtgagagtggccaggcagctgcttcccagatgtgtgcattctgcagaaatggtcatatccaaactggagagctttgggaggattggttggggatattagggacagggccttggaaattcctctgaggatgtattaacctatggggaacaagcccagcgaccagctgatgaccccagggtaaaagattggagctagagagggattgggaaggtcctggaatgttctcagctctcctttccaaaactctgtgtccaaacatatgactttactacatttgccagatgacctgattcatttagcatgtatgtgtgtgttttctcaacaagtagaaaattatcttctctaggaaggtcttgaacctaccacttctcacctggaatatcagtggcctctactctggtctccctaggaccattcttgagttgctcctgtccattcttcacacagcaggtaaagaaaagcacagttggccctccgtttctctgggttctgcatttgtggattctaaaaatattccccccaaaatcgcatctgtattaaacatgtgcatacttttttcttgttatcattcccaaaactatacaatataatatctatttacatagcatttgcattgcattaggtattataagtaatctagagatgatttaaagtatccaggaggatatgcataagttatatacaaatactctgccattgtgtatcagggacttgagcatttgcagattttgttacccacagttgggggagggaatcctggagccaatcccccgtatttaaaattaaaactggaccatctcattcccctgctgaaaacacttcaatagcttcctttttttctaaaataaaatggaaaacttttctccatggcttataagacctcaaggggttggactccaacctgcttctcccacctcatttggtagatccttcccctcgctccagctcctaaaactccccaagctcttttccaacctcaaacctttactcaagctgttcctttgccgaatttcttctctcccctgctcactttctgcaaagtggctccccctcctcttctggtcttccctaaccacccaattgaaaataagcatctcaccattccctttattccctctcacagtactttcttctagaatctcatcattgcccttaccacattttacaagtgacattcacttgtttgttgcttgtcttccccatttgattgtaagcaacatgagggtagaaaccaggtatattttgtgctctggtgcagtgtacaccaaaaatagacattcaacatttattaaatgaatgaataaagtgtatctttattttattttgagtatcctccactctattgcttcctaaatatatatttttacttcacacatcagtaaaaaaaagttttagtgttagggactgtcctaggattgtcatatactattagagtcatttcataaagcaaggtcttttttacaacctcgagataagaagagcatacattcagaaaaaaataaaaccctctccatgaaagcacagttggtaatatgacacgagtggtcttcgttttactgaggacctgcaaagatgttggcataaatagcccctgtctgctgactgacatttggaaaccttagcccaaacgtatagcttgtattctatgaccccacctggccctggtagagttcttagtagagttcttagtgactctgaatgtccgtgtggccccatacagatcatttcccttctgtggggctcagtcctgacctatgcagggtgctagggttctaagaagaaagtgaggtggtgactgaggccccactcagctttagatatacccacaaactgtaatataagagagaggcagagctgtgccttctactaaggggactacgggtgacccatatctgagccatgcactgctgctggttgcagggagtggggtggtcatttatttgtgtgaagggcagccaagggagagaggggaggcagccagagtgggtggccgattcctgtctctgacccttggggcagcgcctgcagctcctgccaggctcccacacctcggctaagaatagctcagctctttcctgctggcctgcagtcctccggagcccagaggaaagagaactggactgtctaacctcaggctaggctgtcccttccggcgattctctccttcgctctggggacaaaggcctgccagggatttcagttctagcctctgatgttcccatctaataatagtgctgtggggtacagggcagggtggtattcaggccaccctctaaggggtgggaagatggaggccttcagactgaaatcaaatggttcccagtgctaagggttggagaatggatgcctagggaagagaaagtcatcggggacttcagcgtaagctgaggtcagaggagggagcatcagactgagtctcagagggaaaagaagttcctggttctgagtaggaccaaggtgggcctgggcacttgtgtggacactcagctcacagctggctctgaagcaggtggcctgaaaactacactaggagaaacgccctaatgacagatggtttactggtccagaaagcaaatctctgcatcagggactggctcccgttctgactcctgaggtgacatcaggaccagcattaagccccagtgactaaggtgaccatataatttatcgcccaaacaggggcacgtttgaccatgaacaaagactgtcaacaatcacaccaggatggtgtgcacaggtggggattgtccggggaaagccaggacttctgcttgctctaaccactatacattgctgagtgtctgtgttcctctctccatagatttctcaataagaacacatgagatgcaatcaattaaaaaagagctttagagactgaggcaccacaggaatacagggattataaccaagcttccctgcatttcacgggtcctgtcccttctgcataaatcaagtggaaggaagttaattatagccacagagctgtgctccagggctaggaaagaaaggagaacctttctcaggaagtcccattgctgggctgggctgggggccgcctgggcagagagataagctgcgccgatgggtcgggagcagcagccttggtggttttctgccgccgaagtcctggcctgcaggaaaccccagggaggacccctgcatcctcttttacagcagaataatcttagcacccagttaactgcccacaatctatacaactcacttgaacaaataggcttaatgtatattaattaaggagtttgtaaggggcagatactctgttatgtgtcagattctgggttaatttctgcagatttaacaacaaataggacaacagtcctgtcttttaaggaactcacagttgagcaaggggaggcagagggctaaataatttatgaagtgatggaacaatgctgttttgatggtgatacctgtttaaaccactctttaaacggatgataactgtctatataggagcacatttgccaatgcagtgaaatttactgagaggcacggtggaatatttgtgaggaatataggtttggagtcagtcagacctgaatttgaatttcagctgttctaactcacaaactgtgtactctttatccagtttcttttttccattctctcagaatgtgatcagtaagtttcttaacccttcagagttgcctactctgtaaaaggtagatagtaatagcactcactttataaagcagtacttctacattttaacgtatgaacaaatcacctgggaatcttgcagaaatgcagattctgactcagcaggtctgacctagggcctggggttctgcatttttaacaagctcccaggtgatgctgctgctgctgatctgaggaccacactttgagcagcaaggtcataggatgttgaaagatcaactaagtgctgagcacacatctagcaaataagtttagtgctcaataaatgtgccctattactactcaaatgtaatgtgaaaaatggtcatttatcttcattcaaatatctcccccatgttatcataaattaaaagaaaatgtcttaagtcagggaagcactccctgccacatctctagggtaccatatgaggccagttcttttcatcgtccatgacattgggaagaagagaggaatggaagattcagaatgtatttctcataccatatagttcagcagtaactttatgacccccaaatcctcctgatgtgaggagtggtgggaactcttgctgaactgtgacatctctcctgccaaatgtggaagctgtgaaggcaccactctcagacccaatatgaacagtaaatactaacggtaaagtgcagatatccaaaacatgactaaaatccacatatttttgtaagctttggtggttttaagatatggccccaaatttgtcaatgcccttattattgagaggcaggctctaggtcccccaccccttaaatctgagctagtgtgtgactgcttcaactgagtaacacagcagtgctgctgtgtgacttctgagaccagagcagaaagcgccctgcagcttcctcctgtctcctttggaatgcttgctctcctgacacactccctgtcttggatccagctgccgcgtgccacatgagaggtcctgcctaggcgctctggttgacagcctcagctgagcccagcctttcagtaatcccagctcaggcgccgggcatgtaaacgaaggagctgccagatgcttccacctcccagttgttcaagttacccccagccattccagttttcccagctgaggcctcaggcacggtggagcagggacaagcccttcctgctgtgctctgacccacacacttcatgaagagaataaaatgcttgttgttctatgccagtaagttctggcatagagcaagtaatttgttcctcagcaacaaataattcaaacataaacattatttttttatttagtataaaaaataaatctggtacttaagcagaatacgtatggaaaaaaattttaaatatcgtatttaaaaattaaagataatataaaattagctgggcatcgtggcacatgcctgtaatcacagctagtaggaggctgaggcaggagaatcgcttgaacctgggaggtgggggttgcagtgagctgagatggcaccactgcactcccgcctgggtgacaagagtggaaccccatctcaaaaaataaataaattaaaaaaataaaaattaacattaacatttatcttgataaatatatcttatttacatatattaaatattatacatattattcaatattatttatttgttatacagttaatagtccattaggtttttgaaagtaaacatcaagagctgggcctagtggctcatgtctgtaatttcagcactttgggaggccaaggcaggaggattgcttgaggccaggagttcaagaccagcctgggcaacatagtgagaccctgtctctacaaaaataaaattagatgagattttgaggttacgttgagctatgatcaggccactgcgcttcagcctgggtgacagagcaagaccctatctcaaaaagaaaaagtaagcatcaaatctctaacaaattaaatttaaattccacgattaagtattacatcattagcagagggagagtacatagtgggaaaaaaatcaggctttggaatcagacagaactgggtttgaattctaactttaaaatttactcagtgtgtgatctcaagtggtttatctttctatatctcagtattctaatctattagtttaataatatctactgcataggggctgtggaagatattgaataaaagtaattatagcacataatataattattgttgttagtatttccagaaagatctctcaagaaaaatgtgtagtggtaattacaaggtagttacaagggcaataagtggtaattgtaagatgggaacctaagcaacctgtcgtgaggcagacagagaggtttctgaggaagccaccccctaaattgagtctcaaaatgagtaagaataactaggttagatattctcagactttagaattttttaaatttccaaaaaatgttggggacaaatctagggaaaaatacttttaaaaaatcaattttctaggatgagagcagtggctcacacctataatcgcagcactgggaggccaaggcagtagaattgcttgaggccaggagctcaagaccagcctgggcaatatagtgagatgcgctctctctctcttagaaaaatttaaaaaagcaattttctaaaattttatgtaaattcaaagggccaataatagccaagccaatcttgaagagaacaaagctggaggtcttatatttttataaatcaagatctatcatagaggtagtaactaaggtagtgtggttttggaatgaggatagataaactgatgaatggaacagaacagagtcaggaacacacttacctgtgtttggtcacatgatttatgtcaaaggtgacaaatcagagatgatgacgatacagaagagcaatagacaagtgtgcagagaagaagaaaagagtgtcacagaacccaagggatgaaggaacttcaagaaggaaggagagatcaacagtgtcaaatacagtagttgtctatgaagctgaaaagttactttgaatttgacttgcaatgcaatgttaatgtcttaaaatgggctcttccagtcaagtggacaggagtcagattatagtgttttgcagagtgagtagaagtgatgggttagacataggaagcctgggctgttcctccaagaacctggatgagaagggaggcaaaaaatttacaagtgtataaggaacaggtgttccttatttatttgttaaggctagcggagacttgagtatgtttctaagctgaggagaagatgaaagttgagaggaaaaggaaaatacatgtcattgaagatgtattatattgctagtccagaggaaatccagtgtattccaggagagaggaagattaagagtcaagaataacaggtggataaactgaattttatgtatctttaaatgtctccagaaactattataataacatttcagttaaaatagcctcaatgcttggacattctcagttatgtctcaaaggtcttttagctgcctaaaaaatgtattttgaaatacttcaggcataaaaaagactataaagagcattgtaaggaacttatgaactctccattcaccttaagaaatgcgacattaccagaagtgaagagtcctttagctctcatttctgatcatgacttcctcccctccccaatatcttcaaagggaatcctcatctggagtttgctgtttatagttcctgagcatttctttatacaaaacatatatttgcacttatctctaagggatatatatattgtcttacaattttgcatattttaagtaaatggcatcatgtatattctgcaacttggttttattcctcaatatttttgtaaaattgacttttgctgacacatgcaactccagtttattaatttttactggtgtgtggcattccattatatggatacaacataatttatttatcttctcacctattgatatttccagtatttttcaattacaaacattgacacaacgaacattcttgtacatgttaccacgtacacatatgcaataaattatttatggtacatacatacctagaggtaagattgccgagttgttgacaagtgaatatgctcagcttcagtaaagctaaattcacaaattgctatttggtgtggttgttcctattgatcaggtctggaaaattctcagcaattatctctgcaaatattccctttgccccatatcctccatcctttctttctggagctctaattgaatactgatcagaacttctcaatatagcctctatatctcttaacttctctttcatattttctacctctttgaatatctgagctgcattttagcaattttttcatttcaattttttgttttttagtcagagtcatattctgtcccccaggctggagtacagtggcacaatctcggctcactgcaatgcctgcctaccgggttcaagcgattctcatgcctcagcctcccgagtagctgggtttgcttgcaccaccatgtccggctaatttttgtatttttagtagagatgggttttgtcacattggccaggctggtctcaagctcctggcctcatgtgatccacccgcctcagccttccaaagtgctgggattacaggcatgagccactgcccctggccttcatttctgttttaatgttttatcacttcttcaccttttggttaagagcaagtgtattatctattttactatttactaattcaactaattatgtcttcagttgtactttattttgaatcatatattttaattctaatctttgatttttatgttacaaaatacatcacacaggtagagtactccaaaattggattgcttcaagtgatgtttatatttttagggtacagattatttatcagatgtatgttgtaatatcttctcccagtctgtcatgtgtcctttttaaacatgatttcttttgctctgtagaagttttcaactttagtgtagtctaattcatcagtctcttcctttacgaattgtgccttttgtatcttgtataagttttttttacattgtaatcttaaaaatatcatcttagaattttatccaaaaatcttaagttttttacattttgtctttaattctattggaattaatattgattttgtaatgatgttggtatccagtattactactttacatgaggctcattggtccagcattaattagttacaggcatacctcagagatattgtagatttagttccagaccactgcagtaaagcacatagctcaatgaatcaagtcacacattttttttaatttcccagtgcatataaaagttatatttaccctatactatagtctattaaatgtgaaatagcataatgtctataaaaacaatgtacataccttattttaaaaatattttattgctaaaaaatgctaatgatcatctgagcctttggtgagtagtaatctttttgctggtggagggtcttgccttgatgttgatggctgctgacttatcagggcagtggttgctgaaggttggggtggctggggcaatttcttaaaataagacaacaatgaagttcactgcattgatttaatcttgctttcatgaaagatttctctggagcataagatgctgtttgacaacattttacccacagtagaacttctttcaaaattggggtcagtactcaaaccctgccctgtcaactaagtttatgtaatactctaaatcctttgttgtattccaacagtgttcagagcatgttcacaaggagtagaattccatctcaaggaaccactctcattgctcatccacaagaagcaactcaactcctcgtctgttaaagtttgatcatgagatcacagaaattcagtcccatcttcagtcttcacttttaatcctagttctcttgttatttccatcacatgtgcagttacttcctccactaaagacttgaacccttcaaagttatccatgagaattagaatcaacttcttccaaactcctggtaatgttgatattttgacctcctcccatgaatcacgaatgtacttaatggcatctagaatggtgaatcctttccagaagatttcccattcactttgcccagatccaccaggggactcactatttatggcagctacagggttacaaaatgtatttcttaaataatgacttgaaagtcaaaattactgctcgattcacaggcagcagaatagatgttatcttaacaggcatgaaaacaacattcatctccttgtacatctccatcagaggtcttgggtgactaggtacattgtcaataagcagtaatattttgaaaggaatctttttttcctgagtggtaggtctcaacagtgggcttaaaatattcaataaagcatcatataaatagatctgctgtcatatctgggctttgtttttccatttatagagcacaggcagagcagatttaccataattcttaagggccctaggattttcaaaatggtaaagaagcattgacttcagcttaaaatcatcagctgcattagcccctaacaagagtcagcctatcctttgaagctctgaggtcagacattgacttctgcttagctataaaaaccctagatggcattttctttcaatgcatggttgtttcatctacattgaaagtatgttgtttagtgtggccaccttcatcaatgatctcgcctagatcttctggataacttgctgcagcttctacattagcacttgccacttcaccttgtatatttatgttatggagatggcttctttccttaaacctcattaaccagcctctgctggcttccagcttttcttctgccacttcctcacctttctcagccttcacagaattgaagaaagttatagccttgttctggagtagggtttggcttcagggaatgttgtggctggtttgatcttctattcaaaccactaaaactttctctatatcagcaataaggctatttcacttttttatcatctgtgtattcattggcataacaattttatttccttcaagaacttttcctttgcatttacaactttgctgtttcatgcaaaaggcctagcttttggcctttctcagctttcaacagccgttcctctctaagcttaattatttctagcttttcatttaatgtgaggcatgtgtgactcttcctttgtacttaaacacgtaggggccattataggataattcattggcctaatttcattattgtcatatctcaggaaatagggaggcttggggagagggagagagaagggagaatggccagtctgtggagcagtgagagaacacacaagatgtatccattaaactctctgtcttttatgggcacagttcatgacatccccccaaaatgacattagtaacatcaaagatgacttatcacagatcactacaacagatataataataatgaaaaaggttgaaatattgcaagaattttcaaaatgtgacacagaggcaaagagtgagcacatgctgctcaacaatggtgccaatgaacttgctggatgcagggttgccacaaaccttcaaattgtaaaaaactcagtgtcaatatggagagacacaataaagtgaggactgcctgtcagagtcagtcttttctttatcaatcttaaatgtcattccaatcttagataaatgttccacgtatgtatatttctagatgctgtagtctattccattcatttatatttctatcctgtgtcaatacctcactatctcaattaccatagcttcgaaataaatcttgatatatagatggtaggggcaatcccctccacttcatcctttttcttcaaaaatatctggactatcattgaactttcactctttcatataaattttagaatcagcttacccagaaaaaccatgctggctttaaaaaattataattatggcaaataaaaagattaaattggagatgcaggagagtttatgatattaagtctgtctatctatacatgaacatcacaaagctaattctttaagtttttttttgaaatgaagtcttgctctgttgcccaggctggagtgcagtggtgccatcttggctcactgcaaccgccacctcccgggttcaagcttttctcttgcctcagcctccccagtagctgggacaacaggcgtgggccaccatgcccagctaatttttgtatttttagtagacatgaggtttcaccgtgttggccaggctggctcaaactcctgacctcaagtgacctgcctgcctcggcctcccaaaatgctgggattacaggcatgaaccactgcgcctggcctgtttaagtcttttttaatgtctcaagacattttatcattttctaccccaaatgaatgcagttttgctgttagattcattcctgggtaactactgcttgccattaccaatgatatctaaataatttgttgtgtcgtataggaagaaacccatttttgtacattcatacaatcagcaacttggaacttggatttattttaaatatacacaatcaaatcaacagtgaatatgacagttttatctcttcttttacatttatttctttttcttttcttgctgcgctggccagaacagaaagcatgatgttaaatagaagcaatgaatctggacatctttgttctgttcctgattttaaaggaaatatttctgacatttcaccaggaagaataatttcctttaagtttagaccaatgtttctcaaacttctgtgtgttttagaatttccttgaccactcaatcacaacaatcacagattgctggatcccagctccaggattcctgattcagtaggtctaaggtaggattggagaattttcatttctaacaaatttccaggtgctactgatgctgctggcccaggggccatgttttgagactcactggattagacataaattttgctggagactgacagctgttttcaattctcttacctattcttcccttcccccttggtaatagaaccctgaatttagttgagaacattgcagcccagggaaaagactacaattcccagacttacttatcgttaagtgtggccatgtgactaagtttgggccaagaaaattaaagccaagtgttgtttgagatttctggaagactccttaaaagggagatgttccggttatatattgctatgaaggaaactgcatactctcagaggctcaaaacaaacattttactttgctcacagtttcatagatcaggaattcagaaatggtctggctggatggtttatctctgatccacatggtgtcaactgagatagctagggctggggcatccacttccaggatgacttcttcactcttatgtctggcacctctgtgctcctcgatctcttatcacatgacttctcttcctccagggcctttctatggagcttgggcttttctcacagcatggtggtcccagaataatcaccttgagcccggctgctaggaggaaggaagcagtagccatgagtccagttaagggatatgcctggaattggcacagtgtcatttctgccatattttattggtcaaagaagaaaatccttcaatattcatgggagtagagaaataactccattctttggtgggagaatggaaaggtcacattgcaaaagaacatttgggatgagagatattgctgtggccatatttggaaaataggaactgccacaggagggatgggaagcagaagtatgatggctgtcttggaccatgaaattgaagccaagcattgtgatggcaaagtaaagagaagcctaggtccctgatgatgccatagagtcactataccatcactggtgtttgagagaaatgattttttttctcttgatatttgaaggagatttctgttatgtgcagatgattctaatcctaattaatacaatactctttttaacataaaccagtattaacctttgttaaattttttccagaatctatagcaataatcatattggttttttttctttaattggttagtatagaaaatgctgttagtacattttttttttttttttgagacaggatcttgctctgtcacccaggctggagtgcagtggtaccatctcaggtcactgcaatctccacctcccaggttcaaagaattcttctgcctcagcctcctgagaagctgggactacaggtgtgcaccactgcgcctggctaatttttgcatttttggtagagacagggtctcaccatgttggccagactggtctcaaactcctggcctcaggtgatccacccacctcagcctcccagagtgctgggattacaggcgtgagccaccacacctggccagttttctagtattttgtcttgaattctgtatttctgcttattaatgggttgatatgtgatttttctttcttactgtcctagtatgcttttgctttaaagttctattagcctggtaaaataagtggttagtatttcttctttgtctattatctggaagtatttatataaattggaattacttgttccttgactgttttacagaactcaccactaaaatgtctgagtcttgggtgagaatgtatctgtgtgggtaaatttttatccttattcaacttatttaataattatagcaacatgcagattttctatttattttttagtcagttttgatgtgtaatattttctctttgatctgttttcaaactttaaagtacataattgttcatactagtctcggtatttaaaactatcttgtatatctacagttatgagttattttcaaattccaatatttattattttccttctttcttttttaaaaaaattaaggaaggaggccacctctcttattgtctcatacctcagaaaaagaaagaggaagtaaaagttaaagaaaggcaaaaatgagatcaataaacagccctgtgctgcaccccagacctggtctagtagttaaaaatcaacccctgacctaaccacttgtattatctatagattccaggcattgtatgagaaagcactgtgaaactttctgttctgttctgtcttgattactgatgcatgcagccccagccacgtaccccatgcttgctcaatcaatcatgaccctttcacatggactcccttagagctgtaagcccttaaaaggggcaggcatttctctcttggggagctctgtttttttggatgcaagtctgctgaagctcctggctgaataaagccacttccttctttaacccagtgtctgaggggttttgtccacagctcatcctcctgcaaaatcaatctagttacaaagtgtcagtctttaaaatctcaaaacatcaatttttggctttgttctctttgtgcattctgttgttctttttgcaatttcttaagacatttaactcattaatttccattcttattttctaatataaatatttaagtctgcaaaatcgccaccaatatctccttttctgtgttacacataattggatatgtagtattttactaccatttaagcttacgttttttccaatttccaccttgatttattcttcagtacatggattttttagaagcatttttaaattttcaaaaatcttggatttgttatctttgtaaagaaaccacttagctccattttggtcagaatagatagtgtctatgatatgacaactttcctacttacagagacttgtttaataacctaataatacatgttgataagtgttcctttacttgagcagatgtacatttgccagttggtagtttcagagtactatatacagctactggaataaatattgattatatcacttaaatctactggtagctgattgactgcttaatctattaatgtaatattgttgtgattgattgcattaaaatctttcactaagtatatagatttttgttgttttcttttcatagttctatcaattttgctttgtatgtttgaaactatattattaggtatagaatgggatagaattaaaacaatatttaattatattaatcttcagtaagctttttgcattaaagtcgatcttgtttgatattaatataaatacatgagtttttttctatcagtatttgcctgaattactaacttgcctcttacttttgacatttctgcatcttgtgtctttacatttaagatgtgtcttttgtaaacagtattaagctgactttttattttaatcatctctatcgtttaattggtaggtttttagtctacttacaattattataattatttattcatttagatttatttctatcattgtatttcatgtttcctatttgtcctacttttaaaaactcttttttctttattttcatttttttagataggtcatttttcttaattcaatttttttcctcttatactaatttggaagttcagtgttctatttcaattatttgagaggttagacttaaacttttagcagtatattaatcttaacaaagtctaagattaataccttcatttttttcaaacattcaaggatttccccttttgtgttacaggatattgtattctgttaattgaaatctattttcattcatttttcatcagcaaatatttattgagtgcttactgtatgccaacactgtcatagtagcacacaatacatcagtaaacaaaatcttccaaaataagaattcttaacccccacccttataaggtcagcctatagttaagagttctaggggaactttttttgtccctactccaccacacccccaaagtccagatgcaaaaagaaaaatttccttgtgatttatctttatataaactgtcagaaataaaagtggaaataaacaattaaatagcacatacatacacatttgtaaaatatgtatagatatatgtatatgtgtgcatatccatgcacgcatataaacaaagattttatcagaatatatccctgtgtactttaaagactcctatttgtcacaaagctgattatcaaaaataaaaggaaaaaaaagcagaaaaagaaaaaaagcataccttctcctcatttcccctgtctacatcagccacattcctctctttttacaaattcttttggcatttacctccatatttattttaaaaacatgcttatattactacttcctgattttttctatttctgtcattacaagtaaattcccgaggttggcagaggaggtttagctgttttgctttacctcctccattataccatttactctcctgccccacaaggttaattccagggatgacaatacgtggttcattttgcacagttatatcctaatactgatgtggacaatctttatttcgcatttactattttaaaattatacaaactctataggtgaacaaagtaacttaaatattttctgccttttctgaactatttttttattttccctgctaataaacatagtcttgagtttttacttggtgtgggttttgttcatctatatagctgagtgcttgataagtcttttgtctctggaaacacataactggccatttgggggtgttaaaagaaaaactttagacaaattcaatttagcagagtttatgtatttatttatttattttcagacagagtcttgctctgtcacccaggctagagtgcagtgacatgatctcggctcactgcaacctccgcctcccgggttcaagtgattctcctgcctcagcctcttaagtagctgggattacaggtgcatgccactgcactgggctattttttttttttattttttggtatttttagtagagacggggtttcaccaggttggtcaggctggtctcgaactcctgacctcgtgatccgcccgcctcggtctcccaatgtgctgagttacaggcgtgagccactgtgcccggccagcagagtttgtttaagcaagagtgattcacgaatcaggcagtagctagaatcaatagaggttcagagagctccactcagcaaagtggagctctctgaaagtggagctctttatagacaggaggaagtgacacacagagatagcttgcttggatacagcatggcatttgctgtatttgaacatggtctgattagctggcagcctgtgactattatttgttataagaatactcttaaggtggtttgccatttgtgtacacgctgaggttgcagtttgctatgtaaaaattcaaaatacagaggcagcttaggccaaatttaattgaatttaataagggaaaatatcttgaactattttgttgtctgggtattggactttctgaactagccctctggctttcttttcttttcaataatattttccatcttgtgtttttactctatcctgggtgattttcaactcttttattacgttttgttttctgaatgttgtttcttttttttgttttttgtttttggcattctggtttttttttttttttgtaatatcttttcttctctcattcctttgagaaaagatattagtatctttccacatctctgtgagaatattaatgatagttcttttaaaaaatgttttttcttcctgcatagtctccattttttctaagttgctttaccaccctgtttacatgtttgtttgatttggtttatatgtatcatgatagaggctttctttgatatctgatggcccttgagtgtctgttcatatttactggctatgggagcaccagtgacctgattggtgaggctctgagagtgagggtttgggttgcagctgagacatatctttggggaactccttggcatcagtagctttggatctttcctcttgtgtttgtcagaggctccaggaagttttccattctcctgtctgggatgtttagtgctagctgcatatgtcctgggaactagtgagagaacaggctaaggatctcagcattcaactgatgttctgttttcagaattatgcacctgtcctaagcagacgctgatgtctggcagtctagtgattcttacatccttcagtgactagatctctggtcatttttctgcatttgggaagggacagttacctatggtatgggaggaggaacaagtaggaggtgggtggaaatgtggagattaactgtttcttaaaatgacctgcaatcaattatttcatttttaactttaactttaccttcacttcctagaggttcctcctgccagttctaagcttttgggagattttaaaattaaaggtctgtttttgtttgtttgtttgtttgttttagctttccccagtacaggattaggattcagccttctacagttcttctaagtcagttactgctcttccatatgtttttaagcttccaatgttttaccattactgatctgtcctgcacctctttattcttgtgaaaaaattttctttgctcccattttagtggggtttcagaaaggcataacagtaaatgataaaataatcctttgtatgcatccagaagtagcatgcattttttctgattctccttcagtgagtaagtatggttcttcagtaagtgtggccctatggttccaccaatagtgctctccagaggtcttggttcaggtaccacagaaaaaaggccttctttcttttcctctttgttatggtttaaatcaaaacttctatttgaccaattgaaaaaattcctctggacagcttggcatggagcacggatttataaatctgatttcttgttcctttagggatttcttttacttttttgtgagctcagctttgtatttaaaaggatggatgtctctcaggactggcaatggttacttaggcagataatgtcatatttatccattcattttacaagcagtatttaaccctatatataccctgtgcttgaaggtatggagagatatgtccctgttgtacatgtgcccaagaggactagagaattgaacagaataaagcagatttgagcagtgtccctaattgagcacaagagggtcgccaacccaaggtgttggagagaaccacgaagtaacatataaggaagggcacgcccacaggttatggtcaaaggaggcttggaaacatggcaggaattggatcactggaaggagacattttaatttgacacacacacaaaatggagagttaatgtttcctgaacctgaagctgttatgatcaaatagtgtttcaccagcgaattttgagagctttatatattgaccatgagacaaggagggacagggatgactagagatagagaaaccagctaggaacaaccacaatagtccatggaccaactgtggctttcacactcattttttttttctttttgggagaaagataatttataaaggtctcaactatttcaaatgtgtgtgttggtttttttttaatttgatttaggattcaaactttacttcaatatcagaggactctgaagttctcttagaaacattatctagagtcatttgcttgccaaatatttctaagtagcaacaacaaaaacaattaaattctttgtagttaaaaggcctttctagatgtgaaaaagaacatttgctcataataccatttaattctactttcagtctgtgacctcaggcatcctgagacatccaaatccaatttattctggaaaatgttttagatttcaaaatttcagataactagagcctatatttcatttttttaaaatttgcatactcttttaaagtttaacacaagaaaatcaaagaagccataattactgtaaataaaaaaataaaaatgcattttttaaaaccccaagaaatttccccaaatttcactaaaacactgtcattaatctatgtattaatccataaagatttctgaaaggtataaaggatttaaaatgtcaattacatttaattctcattagttctaattagtgagtacagacaaatactaccttcaaaaataccattttttaatatccaatacaaattaggttgtctttttaccggcttatacatttttttttatttattatcctttctcaaaacgctttttcactctcaaccttctttttagtgattgggtttttgttcatatactttcttcacaggcttttccacttttttagaaagcattttcacttaacaatgtggagaagatgacaatgataacacacaggtttaaacaacacaacaagcaatgcaagcaaaatagaagccatcttacaggcaaagcagctagatccaactacagggcaccctataccctcctgcccaaacttgtgttcaaattataagttttcactggccccagcatgcagatattttatagcaggttttcaattagggtactgcatgtgggataaaaatggacgcaagccattacagggaatatttgcagagtgagaattcaggtagtaagggttatctatattgtgctctgtgcgtccactgtcttctctaaaaaaaactaggtgaaaaaaattttaattaacaaaatatatacaaacaaaatacaaaaacacaaaaaggaagacaaattattatatttattttcttatggtttgcattctttcttctgatcagacaacaaatccctttgtggaagtgacctcattttacaattcagtccaacaaatgatgctggccgcccacgtggtgccaggcacagcgccaggcactggaggcagggagctacttatgacgcagatggagcaccaaggctgagcttgtcagcttgctccggaaaatgtttgtttcctcccagtttccatgtctggatgccttgtatctgccgctaggtaactgggttatttctccacagcactcccctctccaaacaaaagctttccccaaccataaccagcaagacaaaatagcaatctggtcatttatgttgatattcacccaaaacgtggtcattaaaataagagcatcaatttttacgtcgctattaattacttatcattgtttataatgcttatatattttagagcgaaatataaagaaataaaaacagggaagtgcaaactgagtatctacctcccattaaacttcaactttagttctaaccatttctttatctaaccccgtttttcttattttgtaaaaacaacctttaaagtgtccagtgccacaaaatcctagcttttcagagtttcagaaactagagtctctttctctctctgcttcagggcttctgatagttcttgggtcaaaagcctgtagttatttacgtatacttactagagaaagggcattctattttactgtttgctgccatgaatagactctgacgcattttaactggccggctagactttcagaggaaatctggctttaagctttcagaagagaccttcctctttctttttctttcatagttagaagaggagtccgggcacggtggctcacgcgtgtaatcccagcactttgggaggccgaggccggtggatcacctgaggccaggagttggagaccagcctgggcaacatggtgaaaccccgtctctactaaaaatataaaaattagctgggcgtgatggcgcacgcctgtaattccagctactcgggaggctgaggcaggagaattgcttgaacccgggaggcggagcttgcagtgagccgagatctcgccagtgcactccaacctgggtgacagagtgagactccatctcaaaaaaaaaaaaaaaaaaaaaaaaaaaaaaggaaagagcaggaagacaatggcaagcactgagaagcacttatatacacagtcagggcaaagatttcttgcagtagtcagggtcagactggcttcttcccctccttgcccttgagacagagtcacccaggctggagtgcagtggcgcgatctcagctccctgcaacctccgcctcctgggttcaagagattctcgtgcctcagcctcccaagtagctgggattacagacgtgcgccaccacacctagctagtttttgtttttttagtagaggtggggttttgccatgttgcccaggctgatctggaactcctgagctcaaggggatccagcccgcctcggcctcccgaagtgttgggattacaggcgtgagccaccgtgccccacccctccttgccttttaaagcccttaagtgcagtatttattgaggaggcaatttgtatatatatatgtatatatatacagactccccataccagtgatccctagaaatatatcacgtcacatttgtcatttaaaacttaatagtagccacattttaaacagttaccaaaaaagggtgagaagggggatggtagggactgggcgaggtggctcacccctgtaatcccagcactttgggaggccgaagtaggtggatcacttaaggtcaggagttcgagaccagcctggccaacacagcaaaaccctgtctctgctaaaaatacaaaaattctcctggctggtggcgtgcacctgtaattccagctactgagatacagaaggctgaggtgaaagaatcacttgaacctgggaggtggaagttgcagtgagccaaaatcactgccactgcactccagcctgggtgactctgtctcagagtcttagcgtgaaaccctttcttaaaaaaaaaaaaaaaaaaaaaaaggtaaaaaaaggacaaattaattttaataatataactttatataacttaatacacttaaaatactgtatttcaatatgcaatcaatctaaaaaatattgagatattttagatttatttctccttactaaatgtactttacacttagagctcaccaaatgcagaagctcaatttttacaggaaataattgagttgaagtgtatgattttataaaatttacagttggaaaactatattcacatacataaggtgttccaaatatacttaaaatgttttccgttaaatgaaaaaacattctcctttaatatttgcgtccatatgtacaaaactggtccagctttttttcttttaaccataattgctttaaagtcaatttaaagcaaaagctatcagtttcaaaactatcaaagttaatttattaactcttgtgcgaactcggcattattaatattgactcaaaatgatattgatagattgaaaagcaactgtttataagtatccacaatgagttctttacactttttcttgcggttttggtagccaatttaagtaatgctatccattacaattacaatcttctgcatattgactcatataagaaaatgataaagattgttattattgattaaattatgaaaagttttaatttcattttaaaatcttgtatctgtccagagaggccacagataagcattacctttccttggagtttcaagtttagcttatttatatgcagtgtgatatcactgtgaaaacttaaatcacatcgccatcttttgtctttgatttttgaatatttggcaatttttctttattttcaaaaaatattggattggaattaacagtacagtaaatcttcgtaaaattctttcacgactcaaccaaagagcactgtcaaagaaggcatgaggtcattgaactcattgtcttctatttctttcaacagttctataaacttgtgatgattcattgcacctgcatgtatgcactgaatgattttaacaatgtatccaggacacatttcatggagtttgtttcagaaaatgagcataaatatttttaagatgtatcatacagtgaaacaaagaagtaaagaaaatatcagtccctttagaaaaattccagtaagtccgatttttagcttaacatagatggaaaactgtttgttgtgttagaagctaattttttaataactagctgaaattcttcaacagatgtaaaatattgaaaaatactcatgccatgagtttaatattttaggccacgaatagacaataattattagtaaattaataagttgttagggacaaaatatacccaaagcattaatttggcagtgtattttatatctcatgatttatcaaaagctaaaaacaacaaccacaaaatttgcagttttttagattttgaatcagctgatctctgttgtagttaaagagatctggtattttataagcaatgttttggtggcttagttgaatttcttacttttgtgaaatatcttttttgtctttatctcataatttgcttaaaaaattatataactgaaatagtttcttttattatccttccatgtaaaaaatgtgtgtgtgtgtatgtatatgtaagaaccaaagcaaaattatatttggccaaagtgacaagctgggacctgtaaaaagtcttaattttttcttagatatgtaattctaatttcaggtaatacattccattggttcttttttgaatgttgagagaaaatttatcaaattcactatgtagttgccaaaaaatctcaatatttttgtactttattatacttaaataaattttatacaacagctttctcattttgcgcattagcaaattgcagtgctattcattgtgaaatttgcaatatactttttccagtctctctttcttttttttcagttcccatcatagtactagcttctgcacctccatgcaattctgcatcagtaacatgtcttaatttgaattttaaaatttatccatacttttttttaaccagacaaataatttaaatgttacaattacagtaataatattttcatttcattaccggctatgatttatatagtgtcactctaactttttgtgtctacataaaatattcaaataagcatattataatgttacatcactatatagcaaacaattatttaaactggatcaatacgtggacatcaactaaattaatgatgcatttacatctaatactagaaacaatgcatgtgctctacatatacagtataatacaataacatcttttttttttttttttgagacagagtcttgctctgttgcccaggctggagtgtagtggtgcaatcttggctcactgcaagctctgcctcctggcttcacaccattctcccacctcagcctcccgtgtagctgggactacaggcgcccgccaccacacccagctaattttttgtatttttagtagagatgaggtttcactgtgttagccaggatggtctcaatttcctgacttcatgatccgcctgcctcggcctcccaaagtgctaggattactggcgtgagccaccgaaatgttaacctacaaagggatcaagctatgttattggaaaactcttttacacagtttcagcttttaaatgtaaattaattacaattatgtaaaataaaaaatttagtaccacaatggaactatccatatttcaagtgctcaatagccatatggtagctagtgtttaccatattggatactgcagcttctaattatgtggtaactagacctggtagacacctagctcagtccctcagtcagggattttgattccatttccttgagtgaatatttaaaaacacacatgaacagatattttaaaaatatgattaagctattatttatcgtgactcctctaaataaggatgtaataaaatcacaatgtaaactaagaataaaaaaaatctcaacttgcagaaatctagctttcatactttccacattattttttataacatagtatattgaataagatttccatgtaaaccattaagcacaatgtctggaacataagaagtcacatgcttgtttgttttttcactatgtcatctgattgctaatgattttgagccaaaaaaggtggtggctgttgtccatttgttgatgctgctggggatgaggggattgatgctgccccgggagattgatggttgagagccaagactggacttctaagacagcagatgtctccaccctcaacctctcccccaacccataaacccatctcctgactgccagggtgtctggggcttgctcaccacatgggcttagcatcttaagctggtgtcttcctgctaggccccctcttctctgaccatatatatagagaaagctggccactgagtggagggccttgctcaagggcaagcttgtggggaagagcagactaagccttcattcagtgtttttttcagaagtaaggaagggagatctccttcctctgcccccaatccctgtgtatcagaatgtcctgcagagggtcagggaagggactgcatagctttactcccctggtcctaaggattaccttaggaccttaccttaaggagaagcctcgagcccttctcccataatcgcagcggtttctaccctggctagttgtgcctattaaagatttttatatgctctaggttactgaagtttgagtaaggcagtctctacaggaagcaaaattaaggattttccaatattttgcatttggggaggatacctcatcccaccttaaaattggtaagtgtactattcaacttttgaatactggacttctaaacattgtcaggatacagtgttatcataaatgaggaaaaggaagttttaagagtaaacatcggtatttattgagagcttaccatatcctaaatatctcattaatcctcaaagcaaaatttattgaggttgcttttatctccagtttggggatgatgaaccagaggcagcaagaagataaataactttcccaaggacatacaactataaagggtggagtgaagattcaaacctaggcagtctgactctagatttgagttctttgctcttacacacatgtgtgacatgtatctatataaaatatccctagcttggtgaagtaggaataatagtttaattatatgctaggctcatgcctataatcctagcattttgggaggccgaggtgggtggaacgcttgagcccaggagttcgagaccagcctgggcaacatggcgaaaccctgtctctacaaaaattacaaaaattagtagggcgtggtggcatgcactggtagccccagctactcgggaggctgaggagggaggatcacttgagcctgggaggtcacggctgcagtggacagtgatcgtggcactgtgctccagcctggacaacagagtgagactctatctgaaaacaaacaaacaaaatccctattattattattatttttacttttaagcctttctgaaaagaaatcttaaatatctatacagtgctttacttacgtttgcttataatgctgatccaatatttttgttgttgttgctattgtttaattaatttaactttcttcaattgaggtttaaaaattgtcctgtctcctactttagaaaggactcaagattaagacatagggcaagataagataattaacagtaaagttctgcagactacatctgaaggaacaagagagagtggcaatgaggcgctgaaatcaaactgattggcacacgtgggcaataaactgactgtaagctttctggcagccaaagcaaaaactaaacatgttggattgcatagtttttgtttcctgacaataagatggataaaattcagctgcagacaacttaagtaggaattgattgcatgaggctttaataaagggaattcaacaacaacatggaaaatatttaacccaggtttttatgagacacagaagagtcattcagatacttggttgtcatattgttcttaaataagagcagatgcccttacatactaacttgatacttgttaaatcgtctctctaaggctgtaaaaacataatgctgtgtttttttttaagacctaaaatcatgattagaacttggagattctctgatgggtaatttatgtgcaattctctcaaataccagattctttaacaatcactggtcgcatgctaaatacctgtaaataatgagcaaatcctctaaacaatacagatttttccggtgtttatgagagctgtaagctttagatgtaagatagcaaagaaataaatatgtcattgtgtgttggaatgttaagacctcaacttgtaatcctgaccagacagactgaccacttcaggtcctacacccatgtgatatgtatctatataaaacatccctagcagggtgaagtaggaataatagtttaattatatgctaggcactgtttgaaaatattatccacatttttcagatgagataacagaggcttagaaaattagaaagttaaaggtcctatgcaagcagcctgacttcaatgccactgttcttcccagagcacaatactgatacccagagaggcctaagaattctagtccaaactacttgggaaaatgtgactttagtctgacaagtcattgggtttgatgttcccacctgtgtacaccttctcaaagagaacttctctattgttctgttggtgtttttctgaagaaggcatctattagatgccacaaataagtaaaagggtgaaaaagtaacttaaatagcagaataattcaatttaactagttgcagaagattgtctgaaactgcccttttaaatgtgggtgaatgattacttgtttctatgatttaattatggcataattaacattattaatgttccttctggcaatagctgaactacaaattcaattgctccttaagacctctcttgacaaagacaataaaacaatgctcctggttcaaaggagaaaggctggccttcctgtttcctatggcagagacacatgcaccagcaaaattagttttcttagtactagaaagatttaaaaagaagcagtgctaggtcaatgccccatgcaaggccatttaaagttggttctgtatctgctatgagaatctgactagtctaacattgctggtttgtagagttgctaaagaaacaggaggctagcctgggtctgtattatgtattaaatgatgttatgttaccaggtgcccttgatgatttcacaatgtggaggaaatgtattctttaatagagctttgtttctatacaaagcactttgtagtagtagcagtaggaatagaaaagtgggtgtagataggaagtcaaattactggactgagggaccataatgattgggggctacggaaagaaacaaaaaggacagggattttaaaattcagcagctcgggtgatgccgtaatcagcagcagtaggaaaggtaagaaccaggtaggtttggatggtagagggtaaggaaacttgtatataaatctatttgaaagtggatggttgggttcagcaaaggtcctaaaaaattaacagacaccctgccttccttgtttgggacctatgccgtccgttactattccctattaatattgacacaatatcaagagttccctaacagtctgataaaggtctgaaggaggcaaaagagctgacactgccatctcaaaacctgatccaatttatagaaccaataccaggttatccatccatctattcttccatccattcaggttcattcatactcaactaacaggtgtttatatgagccaggcactgcaggctagatactggggatgaaatggctaatagtgcaagttgcttatagtcttattggagagacacatgaaaatgggcagtaacaccagtatgcaatgatggggaatagaagacagagcattatgcaagcacataggagcatctaactcagctcaggtaagtcagagaaacctgcctggaagaggtgatgtccaagtgaagacccaaaggatggagaagggatggtcaggtgaagtggtgaggtaggagccttccaggcagagctgtaagcagtcagcaaggttggagcataaagggtgaagtgaggtgtagtgatagtttggatgaaagaagtaaacaggcaagatcgtaaagcaccttgccttattcaactgtttggacttgattctaagagcagtgtgtgctgtttactaaaggattagatccatatctctcccttaagttggagggatggtgtgggcttgggtagagcttcgagtactttgttgtcttatgatcatctggggctagagtcagagcatcaagacctttggatcatgtcagtgggagcatcttaggaactcagagtcaagggtgataggaaatttggccccagcatcatttggcactctactgtctgactccctctaccttccactaccacttgagcatgcttatcaagggataacaatacctacctgtcttttgtaagcacttgctttgtaccagacacaatgtaagcattttacagcttcttcttgacaactctgtgttgtaggtattattatatccatcttacagatgaggcaactaggctcaaaaactttgagtaccttgccccaggtgacatggtagtaagtgatagagggaagatctgaacccaagcaaactgatcctagagctcacgttaatcactgcaggaaatataaaaatgcaagtagcgttcatttctttaatttggatgttatattgcagggaaagagtctgagatagaactacatgatttttttgtggttttataaatataaccacatgttttatatgtgtagaacattaaatatgccatttaacaatttttaagtgcaaaatttagtggcattaatgacattcatactgttgtgcagctatcgccactatatgtctccaaaacttttccatcagcccaaacagaaacttggtacccattaagcaataactccctattcttccttccctagctcatggtaaactctactttctgtctctatgaatttgcctactctagatatctcatgtaaatggaattgcacaatatttatccttctgtgtttggcttctttgcctggaacaatgtcattaaggtttattcgtgtggtagcatgtatcagaacttcctttatgtctgaaacagacttcattgtatgcacataccacattttgtttattcactcatctgttgatggacacgggtattttccacattttggctattgtaaataatgctgtaatgaacactggtgtacacatatctgcttgagtccctgctttcaagtcttttgcgtaactgcctaggagtggaattgctgggttatatggcgattctgtgtgtagctttttgaggaatcaccaaactgaatattggcaaaaccacaaaactttaaagatggaaagaatcctggagagaattttgttagctcctttactatacaactggggagataattaatttttaaattaattatcattttttgagctttgactatatatggtagccatttaatatacattatcctatttaatcctctccaaaagcctatggtgtgttcattatcttagttttatagatcaagaaactgaagctcagagaggctagataacatgcccagcatctcccaaatggcaaatggaggagcagagctttgtactcaagcctgtccctattgtcaagttaactgaagaccctaaacgtggatctgctcatgttggaaatggttcttagttttgtccatctgtagatggagtacaaaacgttgtgtacttgtgaaaatgtttaattagttctttaactatatttggcattttactttttttatttgtgggttttttttttcatattacctgggttcacatttttaaaatgcaccttcattgtcagtgaatgatggaagacgcaggaaacaaaacactttgttgttattgggtgttggtgctggttttctcttttttgaattttctccaaagtatttctctgtatagctactgtaatctgatgctcagtaaacatcctcttaattggaatgctgttggtagttgggagaactcatctgacttttacatctttttgtcctccttgggtgtgcttatcattcacctcttgtctaattttctttgttattttatagattgaattttcaaatgctgcttcatagtgatgacagcctttctttccaaggattcctttcctgtttaagacgtttcacacaccattgtttaagcacaagcacatttaatcttgagccattgataacatctcctgcaagacttctgcttctcctctgctttatgggtgtttgattccattcattcgttttgtgtaatgtccttattacataatgtattctgttgtggcttccttttttcttttgctctctaagcaatttaattggccatttggggggtcatattactttttttctgcttaggattttaaactctattcttgatgaggctgagaattagtctagcatgtttctcagtctgctttttcatttttacttgcataatgaaagcacactcaagaggagaactagcccttgcagctattccccattgccttctctaaggggctctacttactaattttttcctctctgtcgggtttctaggttttcaaactgggactttcactgcctctggctcacctgctgccctgagcatcttgctggttattctgtctgaataaaaatagtagctcacatttatttattaatatatacaggtgtctattttataaagcacattgaaatacattatctgacttgagtctgacttaaatacagtaagtaaacattattatctctatcttatagatgaggaactaagatgtaaggaggtgaagtcattttcccaaaaccagacaaactaagtggcagatgcaggatgtagaccttatatttttctaatattttcttatttttttttaacacttgggtgtagtcaaattctttctggttcctagtaatcagatagtgagttttcaaaaaaaaaatgtataaagaagctaacggaaaataaaaaggaaataaatgtgggaaaaagcaaagtataaatctaatgaagattgacacatttctagccctaactctgaaccatgtatttcttcactgatttgaattcactttcttttactacataagaaatcaccacaaacttagaagcttaaaataacacccatttgtcagatttgtcagctcacagttctgtgggccaggcaggttttgaatctggcatggcatagctgagttccctgctcagggtatcataaggctaaaatgaagttgttaaccaggcaggcctcttacctggaagctctgaggaagactctacttcaagcccattcttattcttggcaaaactcagttccttgtggttgtaggactgatattcctgttttcttgctggctgtcagctagaggctgctttcaactcctagagccacataaatttcttaacaggtggtcccctccatcttcaagccagcagtggagcctgaaatccctctcatgcttcaaatctccacttcctcttctgcaacaagctagaagaaactctctgcttttgaaaggctcagatgattaggtccagctcacccagatcatctatcttaaggctaactgtgccaaattaatataacctaatgatgggaggaaaatccatcatattcatagtcctggggattatgtagggtgtgtatacgggggtcagtgtgggaagcgggaggaaacatcttagaattctgtcttctggaaaaaatactatttgaggtacacaggctctgctttttttttctaccatcttaagtaacaccacaggctctagaacccctactgtaaggcctgtagggatccctaaaacctctccaacactaattgttgatttcctctctgagtggggcctcagacagcctcactggactttcaggtactctcaggtgtgtaatagaccattcctgactctagccccaagaattcttaaatctgcctttctacatgctgccaaaggtcctttggctcccaaatcttgaaaatcctactctcattcctgacccatctcttcctgttctgggtggcttgccagcaatcactaactgataacagtggtcgtggtctctgctccatggggaacttgagtgttttcctttagggtcctagccggtaacaggcctggtcctggtcctatcctactttctatgtagcataagataatgcattatacttgggctcggctctggaagctactgtgactttctctccatatcctggacagatcaacattaatgaaagtgtcatcctcccaactgcccaccacccacttggcatctcccagccatttctcatttctaatgaggacctcactgaattctcactgaaacctcatttgttgagctgggtgacagacatcacaggatctggtcaataccatagtctggtgcttctgaccatgattccctctaaatagtaaggtagaatacctgcctcagggaagggatcttttaaaatgacagctttaacatgttatattatgtgtccaacactttcttcactgacttactgtatacaaggattatggccatactacggggaaagtattattagacatattttaccaatgaacaaattgaggctcaggaagttcaaaccacttgcctaaggatacagaactaataagtgacagaagcagcatagttcacacctcttccactcccgtgacaacttgttcttagagaatcacacacactatgagaatgccaagaatacagcgaaagaaagcggtgttgtgctctcacacttgggcttctcaacacttgtgtcccatgtgttttttaaaacctttgttttaggaaacgttctgcggcagtcgtttcttcaatctgcatctggttccatcactgtggctgctgcttgcacatcccaacaaagtgctgcactgcgaagcgtttcacagggactcaaacaacaaaacaactcttaaaaagtgtcccataaagtgccatatgcaaacatcatgtgtggcgtgcacattttcagcagcggcagaatgtctgcttcctgtgaggatgcatgggtgggtgcactgaaggcagggatattttctgagtagtgtgtttgggggcagcgttaggtacccaggcacacatgttggcccgacaccccttactcttgggtgtggaacagatctacaacagaaagggcttgtggtaggagtagattcctttgttctgaccctggtagactcagcactgccatttcattgtttctaagaaaggctctgctggtaaatcagtcttagtacctgccaagagcactgtttccttctaggagaatcttcccagcccctggcctctgccagggcctcaggctgagtggggctggccaagtcctatatccactcttcttaccttagacaagaaggaagaaactgattcaaggacagccagtccatagactgaccagcaacctgtaagatggtcaggtatggaatctctttcctaccacaagcagtgtggttaactaggccaatcaagttctcattcttggaaacctgaatttgagattatagagagaaccaggcaactggcagaaagagaaaacagcagacagaaaaagggagactacacgagagtaatggggccacattcatggtgaaacactcggaactgggaactcctgagatggatgagggagatgaggcagcccaatgcttagagtggccagggatcccgaatgtcctcctgacacctccctctgacacctggcttgatttttgtctctactctggtattacagtgagattttagtctctttaattacatcaattaggatgctttgggctgcaagtaacacaaaacccaactaaaagcagtcttcataagaaaaataagtcatctcacttaacaagacaatcctaagcatttcccccactccctgggttggctaatttagtggctcaacaatgtcgtgaagatcccacatgtttcctgaatttcttctcatcaccctctattttgcttgtccttctagcctactttctctcatggtatcagaagcctgcaaaagttccaggcaatgacatccagagatgaaaaaggaaaaaaaaagggaatgtacctttcctttgccccttttaaagcaaaaggaaaataccccaccaactccccagcaagcttctcccacgtctcattggtcagaattgcaccctctacccattcctaaatcaatcactggtgccggcagggaggaatgcagccgcctgaagtacagggtagctctatcctttaatccagtcaatgtcagtcctctgttagccagggagaaggcaaacagcagtgtctgctccacttactacctcatctactgaacaatagagctccatttcatgagatgacctggttacatctgtttccttcaactcagagagttggctaatacccagatcagccttagcaagttgaagacatgatcttcagtaggtactctttgagagtagttgagagctgagtggttatgtaaatacaatattatacggagccctaaaatttccatcgctttctaatattttacggggccccaaacacacacaatagactccaaggaatgaacctatcatgccactgctaactctgggcttctcagttcatttcttgcctccttgggcctcttaagcagtgatggcattctgtctttccatgcaggcttgcttctagctgatacacaggcttttctggaacagtggttttcaaaatttctttgtgcatcagagaatctcctgaagggctccttaaaaattgctgggctcaaaaggacaacatatgaagcttaggagtgaagggacttcctgagcagaaatgggcaaacttcagtctttttactgtgtctttgcagtattctatagataatttccttaatttgtaaatttagtgaccattagctagtgatcatttgatgggcagcgattctaacagtataaagtccacaatgttctatgtccctagcctgccgtttttcagctgcatgtaaaagggggtaggatgagataatcgaccattataaagatttaactattttatgctgaagcggccatattttcaagggatgacaccatcttgcacacaacaatgaaggtactcggccatagacttggagtgagaccatatatggggatgagattcttctagatcctaatactgctgtactggcctgtgtgtacatggggtccttcagctgaggccttgcaaggcaagccagctgtgccatgtttgtagatggggcagaggaagctagaacaatggaaaagtaacctatttatgctaggtccacctattgaaacgaggtaggaatgaggctagggtccttaacttccttcaggcatacttttctagctaccttctgccctgtgtctggtacctacatccttgatgattgttctctttcatccattgtggagatatatatatgtatgaaaagcaaaaaaaataaattgctgggctggcactacctcaaagcttctgatccaggaggcctaggagggggcagttaagatgcatttcttactagttcccaggtgatgcttctgctgctagtctgggcaccacactttgagaatcacagctctagggctaggggtgctaatcttcattccaaatggaaaggaggctgctaaggagtccacttaagtaatttttcctgcgataaagacttgcttccttgtcacttgctgtcaacacccctccacacagcagcgactgcctggcttaattcttaaagtagaggcctctcaatagacagggtggacacttcttcgcctcctggcaggagagagaaagaacggacttcaatctttggttggcagggcctgactaggcagtcgggcacagaaccctagggctttcccacccctttgctttcttacttgtaaaacgaataaaggtactggtcctgccagcttcacaggttgctgtacatagaggaatggttggttgaaagtgccctgcataacgcaagctctttaggactcgcaaacagccttaatcgcagtaagggggcacatcagggctgtgagaaggcccccttgagggctcggcacaggtgattctgggctctctgtgcttgccagcctcctaaagtaggtgcccactttcagaagctctgcacgccccacctgggcgcctctgctggaggtctgcctggcccggggcacccgtgtgcgcgcgaggatttcttttgcagagaatgaaaccaccgttcctttccgtccgtggtctactccggggtccccatcccacgtaagtgctgtggaaccccggggtgatgagccccgggggaagccagcatctcctgccctccagtgccggcgcccggcagagccccgggactcctagtttttgccgccgctgaggacgcggcgcgggctgctggccgcgtcgccgagggagggcccggacagccctgcagcgcgtctcagcggagccctgggggccgcgccgctcctccaaacatgattcagaaccgcccgtcagccttggctccagcgcctggcgcgagcgaaccgggcttggctgtctcggccccgtctgaaccctgcgggccgcgggccagggcgcgccgggatccgctgcgccaggaccctgcagacccggccgcggccgggccgagtgcctcccgccggggccttacgcccacggtccacgcttgcaacaccagggctgtacggcgggtccgcagctgggtctgcgcctgggactcggggctccctgcgctcctcgtgcggcaccccttgccttaaccccaagcggacgggtcctggggcttcaccggccaggccggagccccagccccacaactccccccctcccaccgcactgccccctctgcgctgtggcgggagttggggactggggccggagaaaggagacgcgccggtcctcaagtctcttgagccatttcggttccgggcgcgccccccagggctgcagtcgcgcgaggttccagatagtgcagctgtgtggcgccaggcttccagcgggttcttggtgggggttccctctctgtgagtcggtgggcagagatttgccttggagggtcgcacctggctacagaagtatgagacttagtttccggggagcagaggggccttgggataaggaactgaagcttctggggagtagtttggaattttggttccaccaattatcagctgtccaacctggagaaatccactccccctgttttcttggttataaataactatagctaccatttgagtgcttattattttccatgtactttacgtatgttatttttatctttccaacgattttacaggccatattctgctgatggagaaatgggatctcacccaaggaaagtgacttgccagggttacaccactggtaagtggagacctatgacttgaacctgtctctaactccagagactgtactttctcggtaagtgagaacattgacgccatacaaagaattttaaaactgtaagatggtgacggataccattctcttctgacctgtcctcaggccacgtcctgaagtccaggctgaaagcatgacctttctttctccctacctcctcagccacgcttccctaggcgggtcagagtgcaagaggtagggtctgggactggggacccctgggtcagccttgcacaccacccccacctggacccttcccatcctcatttctaccccacactgctcaatgtccttgagagacaaggtggtgtcactgttgtggcatttctcctccactaccagttgcacaagaggattttctcctgtgctcagagtgggaagaagaccaagaaggtctgtacagtaactcgagaaccctggggcccagtttgagctcttaggacgccagcagtgcctcaactttctcatctgtgtttagaattcactttgcagagaaaatgagtggactcttggggagaggagggcctgggtgtcagagaaatttgggtgccagtcttttgtaaaatggaatctattgataatgccaccaccagtcttgcctgaccccacaagagttgcggtaagactcaaaatggataatggccacacagtgctctgggaagtgtgaagtgcctcataaacataagatggtattattcatagaagccattgcaggcaacaggaatacaaagatgaatgccatcttggaaactttcaggctagcaggggaaatatgaatggccatacagttaaaatataaaacagggcatgcaaatgctccaccaatatgcccgcgtggtgccaactcatactgattttgtaataacaaagaatatatacaggtctatctgggtgacctctactactattgcaagaactcctctccacaatggctctagccaatctgtctcccctctacaattagcttccttcttaccacctgcgtgatctatggcaggattttttttcctttggagtgtgtttgtattagttccctattgctgctgtgattgataaccacacacgtagtggcttaaaacaacacacgtttgttatcttacagttctggatgtaagaagtccaaaatgtgtctcactgggctaaaatcaaggtgtcagcaggactgttccttctggaggctctgggggagactgtttccttgacttctccaggttttcgaggccacctgcattccttggtctgcggccccttctccatcttcaaagctatcagtgaccagccgagtctttctcacattgaatcactgccacctctgcttctgtggacacatctccttctttccctaacactgttttctccccatctcaagaatcttaatataattatatctttaaagttccttttgccttgtaaggtagccgtttcacaggttccagggattaacacctggacatctttgagtcggagggagcatttatcaaaaaacaaaaaccctagggcctcaaacaaaacatttttaaaagagaaatataaaagcttcaactcttcttcaaataagtaacatagcaactttttctataaatgtaacaaattctgaaaaaaaaaaccaaaaaaaacaaagaaacaaactttcagttcctaactacacccataaaaaatcagactccctggtgtcagggaagaagaaacaatgggtgacaataaatagactccacataaaagggaagggaaaggctccctaggttgagaagttatgatatgtgcttcactgggaatgtaggtacagcctttggaaatgattagttgttaacaattgtccacagctcttcagctgctctactttataatcctttagtgtagtgacatctaaaacattttttaaataaatcaatcaactgtattttttagaaaaattttagttcacagcaatattgagcagaaagtagagttgcttgtcccttcaccctcctcccacttaaaacatttttaaagcattaatagaattcttggctccttattttccccccaaaagaaattcctacctaaaaaataaaaatcgtgctgctctggttcaagtggactcatggagtccctcaacctctgtaaatcctactgcatggtttaacacctgttttgcagttacttctcttgagtggaataatgagaataactcaagttagaaagtaccctccggaccacagaagtagggagactgtcatgttggaaattattctccaggcttcagaagcaagaattgtcataatattctcccaggaattagaaaagagcaggctcttgttctgacgtagaagcatagagtcttctaggccataaatctgcttattttagttacaatagtgaaagggccagtgggcaacacggtaaaaagtacatgggcccagaaactggggacttggaaggggcagctgggatgtaggggacatattaattaagacctagtgtgggcctttcgtattctgggtcagataagtgaacaagcaggtgaggttctgtgtgggctaccctggaatacagtgttgcatagggttgtgtgagaggtgcggggaacgcctagaaaactttgcagggagaatgttttctaagccaacacctagaagacaagcaagagtttgctgggcagagagtgaagctgggcgcggctgggatcatggggccggatgtgcacagccgggacatggggaagagctgcagtggagagtggggtatggtggagagcagtcagggccagacgatgctggcgggcctggaggccttgggagcgctgactttctccaagagctgggggtgccaggacagggtcccaagcagcggccctacgtggcctggtttgctcttcactggcaagctccatggccctgggcaatgtgctgcttctgtttttcttctcatcggtgcctggctgagctctggaatcgtttcctgctctgagcctgaaacttcaagcagtaagaagacggtccacagcccggttactggggctctgcaaatgcgacgttcccagtggccctctcccaggctccgggcctccgggtagaggaacttctgtctgtaaaggatgaaggcgaccttgctcaggctgcagcgggatggagaaacgtgacccagcggaggggctttcggctgcgaggtgcgagaggcgacccgaggggtgaaagcaaggcgagtgcggtcagcgcaccgggctgggcggcctccccgccggccggggaattcgttcccagctccagccgcatctcaccgcctctatcgcgcctttggggcctcagagggaggctgcatggcccggaggcctgaaatccgccatttgttccctcccggggcggcagagccacagctcactgaaggctgcagcctcggcagccggaagcgctggccgggcgcttggccagcgaccgcctcgggtcggcctcgggtctgcgcaggcgcaggctcgggaagccgggcgcggtggtgtttctgcggcccgcggctgccctctcgtggccgcaaggcgccatggcacggccgcttccacgcagcggaggtgcgctggccggaaggcggcgggtccggccagccagggagaccagccaagcgctgtgtttttccaggtccgcgcgggccaggggaaccctgcgtgtttgcttggtgggagtggtttactgggaaagtagacggaaggtaccctgcaaatcggcgtgcactgtattgtttgggagtcaacagcctggaaagtaaatatcaggtgagggcagtgctgggaaccaccgcctgccccctcccctggccttggccctgactttgagcggggcaccgcgggccaaacagctcggcggcccaggggagagggaggaggaggaggaggcaggcagcgggggaggtgtcaagactcagaaataggagccagctaggcccaacatacgcctgccaccccaggggctgcaaacagggaataccatcccttctgcccaccccacgaagacatcgtacaccccgacgagtcaccattccagaaaggctggctttctgcaagcgtgcgggggcggtgagagtggagggtggcggggttgctcggggcccacccaagcataactgtctgaagggcacacctcacaacggaaggtttaggcgagaggggtgaacccacactctggcacgagaatcattatgttctgttccacccagggagccgcactacatagagttctctttaaattcatcttcactggctgggtgtggctgagtcttctcctatctcctgattctcagttaactttttgcgtcccaccctgttcttgtctcaagcagtcgctttggaatgtgtttcctctcgtccggggtttgaagattagtcatgaaaaacatcactctgcccttgctgaagtgcatgttggctactcgatcattccacctgtgtgccccaagacggtctgctaaggagggctcccctcttttccatgccctctcagctccagactccatcccatccatcgacattatcctgtgcccccgagggaggagggcgggggagggtttctgtgcctggattattggtgagaggagagcaagtgcagaaatgaagctatgactcttgcagaagtcatgcattccgttcaaggatattcctttccgtagcctccacacattccctctggctgcaggcccctgggatttttctgtgtgaccccgtcacattgcatctgtatagattgtcaaagcacctcatgactgtggaggaagaagtcggggacagaacatggatctggaaggctcacagcatggatttggtagggtgacacaatgtcccatgttcttcaagaaatgtctagactaggtgattgattctatcgtagatctggcacaatgctcctgccacacagggggcaaattgagatccagagagaagtgactggcccaggtcactcagccagctggtaacttagctggaattcgttcccaggtctcctgacatccagttcattcattttttgcacgtttcctgaggacttactgtatgctaggcactgttgtaggtgctaggcatatacaaagtgcccgtatagagcttgtgtcttgtagtgtgtgtgtggggagattgtggataaacaaataaacagatttatccagaatgccacatggttaaaagtttttatgatactcagtgcctcttttcctcttgtttttgaagggaatgggtttgaggcttgagaagagatgttcactcatacactgggtcattaaataaacattagaggatgccccactatgtgccagatgctgtgcagggcacacagatataaaggcaggggtctgtcttcaaaagctgccaccagctgggcagataaggtattcctcttagcatctttacatggatttctgtaattgttatgctaattgtttttctccccagatctctcccaaaaaggatgcttgtagaaaacgatgattctgaaatggtacaaatccctttcccaaaaggcatctcaaagccagccgctgctactgacttattgatggctatcacccagtggccttggggaggcggtgggaagcccaaccactgcctgtaataaggagagacaactcagcatccaccctgcagtgaataatagaacaaaaagctgccggcgcctgcaggatcaaagcacatgagcgatcacagtgtctctgggttaaatagatccgcgaaggccaggcagccagcagatgtcatggaactttttgggggagaagtctgggttatggaggaagcctcagctggatttcagtaccttacaagatgctcttctgtggctctctcctgctaaccttccttggacatggaatactcttccctctatcctccctcttcaccactgctgttcccaaagtctaaaaagatgggggcaggaggtgagacaggaggggatgggaaaagaatactggaccaggaggcaggagacactggatctgtgagtgaaggcaatgctgaatgacttccatggcctcagtctccccatctgtaaaatgggaaggttgatatatggcctcaacctttctgcccactttgataaaccatatttcaccaaaaagaggcagaggggatctgttgcttttcagattcctgtccagttacttctaggtcagacagaatgattgccccaatgattctgggtccgcagactcagtctgtgaaaccccatttcttggaggagttgggatcaggacaggcaagaagactatactattcctgcctcctatttgctccctcttgccagtggggaaatcagtggcaaccttagagtaatcttggaggggtggggggatgagttattattgggatttttatctgcaaagaatattttcagatgttgtttgtgcatttaaatgtacatgcagttctagagtagaagactctagtggttgcggtgctgtgaggcattttgcatatatttatctcactcaagaagaactgtggggtccttgtgaaagtaagtgtgtatgtgtgtgtgtgtgtgtgtgcgcatgtcctgagtcagcctgagtcctgagccttttgtctttgctcctgagtaagccactgggggaggtaaatatataattggaggaagaaatgtgtcaggaaataacttctttacttgtggaaagtcattgaaaacccttggttttgcgtatgagcacagcaccctgtaggcaggtgaggagtcttagaacacggcggggagcgaaccagacacgtactaaagaaacctccatgtttgatataaacccaatgcacaggtccacacagacagggcatggaggtgtgctccacagggccaccacacggacctctgtgatggcaagcccggatgcatgtacaactaaacatcctcacagatacactttaatgtaggtggagacctggtgttatgggttagactatggccccccacaaaatatatgctcaagtctcatctgccatctacattatttggaaatagggtctttgcagatgtaaactggttaagataataaaaataaataaataaataaaggtaatggcaacaatgaaaaaaaaagtaagtcatcctgggatagggtgggagagccctaattcaatgtgactggtgtcctcgaaagaagaggggaatttggacacagagacacagctgaacttactgagcagagcctcccagatgctgcaaactcaaggaggcctctgtgctcatatctttattctctctctctctctctctctctgtctctggtacagcgtttatgctttttggcagttctttcctcttcattcccccatctctccaattacacattcatatacacataaacactccgataccctcaaactaccagaagccacgtcagagacttgagaactttggaccaggaactgatggagacaaagatgacctaggaagatggctacattgggaatggaggcagagattggagttatgtggccacaagggaaggaactcctggggctcccagaagctggaagaaacaaggatccttcccctataggctttggagggagcgtggctctgcaacaccttggttttggacttctagctccagaagtgtaagagaataaatttctgtgatctcatattcagttcatggtgctatatcatggtagccctagaaactaagatacacaggtatgttggatgtatgggtcaggcccacacccagggtgcatacggcctttggttaaaaaaaaactctcatttctgtggggaatccattgccagtggtctggatgacatggccactgcctctcttcagggatgtgcacaagaccctggcctggccaatcagaatacctcatgcccaggaccacagtaactgggtcaggggttgtcaagatttatataaatgatttacataaaatgtttaaatgttttgttaaaatatttaaaataaaaaatgtttctaagatttcagttgccaattgttttttgtgagtatatacaaatacaactgatttttacatattggttttgtatcctgtatacttgctaaattcatgcattagttgtatttttctagatttcttagaattttctatgtacacaaatcacaacgtctgtgaatatacacgacattacttcttcgtttccaaaacttatgcttttcacttcttgttcttgccttgttgcactgggtagaacctcagttgtatattaaatatattttttaaaaaggtagacatttgagccttgtttccaatcttgggaagacactattcagtcttttgcccttgtctgcttctaagctgccaaagcctgtgctgtggtggggaaatgtcactctgtgggccagccatggtgtgagtgtgcagatgggacagcagcagcaggtgcattctcctgggaggccaggcctggtggcaggcatctgtaatccctgctatttgggaggctgaagctggagggtggcttgagcctgggagttcgagtccagcctgagccacacagcgagacactgtctcttaaaacaaaaaataaaaaacaaaaccaacaacccccacgactgcctgccaaattttcctggggaaggcaagacacacaattaagaaagtaaacattatgtcatccttgtctgtatctcagtagccatagttgtggattccttcagttctctcttggtagaaggtggggcctgaataaatgacgacataaaaccagctgaacttagtgagcagagcctcccagatgctgcaaactcaaggaggcctctgtgctcagatctttattttctctctctctctctctctgtctctggcacagcgtttatgctttttggcagttctttcctcttcaatcccccatctcttcaattacacattcatgtacacatcaacactccgataccctcaaactaccagaagccacatcagagacttgagagctttggaccaggaactgatggagacaaagacgacctaggaatggttgcttgccctaccctcaggagtttacaattactgatagagacagaagtctttgcaggaggtggggggcggggggtaggagaaactttacaaacacacctgtcagcatacacagggataataataggaaagggggttttcatacaagggaagcatctggaaactgggagggtcctacaaagctgtataatccagcgtctgttgagatgcaggagaccaccccagctcccaggcctgccttgataaacaccttgaatttgcaagatgaagtttgaggatggggaggagatgctaattatagcctatattaatgaagctataaagtaaataattgtagcctcctattaccaagcacgaagggaatattttgggtaatctaagtggaaagtccagagcgtaggtctggctttaggcatggtggagtagtagcctaaggctcacatcctaccagttagcaaccaaccccaggaagagtaaagctccttccccactagctttggcagaaaagtcctataggaagatctgattagctgggtttgggtcacatgactaccccaacccaatcactgtgaccaagggcatgagatattctgattggccaggccagggtcttgtgcccatccctgaagaggggcagtggccatgccatccagaccactggcaatggattccccacagaaatcttttactggaagaagtagggagctcagttccggacaggcagcacaattgcagcctatgacaccctctaagccttaactccatgtatgactgtatgaagcaaatgacttatcctcatgatgcatgtttcttcatctgaaagagcggtcatagttttgatttatgttatatttacacaatgcatagcatgaagccgatggtcaagaatgcactctgagatgttagggggtattctattcaactggagcccgtggcacagacattttctttgtagcaagccacagagtaagtggtttcattccctgagcctcaatacccggtggccaactagggtaacagattactgtccttggaaaggcacagagctcatcagaaagtgcaggcaagccgggcacagtggctcatgcctgtaatcccagcactttgggaggccatggcgggcagatcacaaggtcaaaaggttgagacgatcctggccaacatggtgaaaccccgtctctactaaaaatacaaaaattagctgggtgtggtggcaggtgcctgtagtcccagctacttgggaggttgaggcaggagaatcgcttgaacctgggaggcggaggttgcagggaactgagattgcgcctgcctgagccatgatcacatgcttgtagctcagagcatggtccctgaggacacaaagacaggtgtcaagtaggtgggtcttgggacacgcactatgtggccctcttttctccagctatccctgtcccaactcaagcacaaataagattacagaaagccacagaaggcagtattcaggaatttaaaagataaacatgcacggggtaattgaatagcattctgctgaaaaatgagctctcagagctcataatcgaggctatgctttagtggaggggctctccccgtctccctttgcaaacccaggaggccagcagctttaaccctttgggagggctgtactagggaagggcaggctttggctttgtgaagactgaggagtcgtgggaaaagtccgatgatggaatgaggcgtcggtgttagagggagccgcttgtttaagctgagggtggagaagtggggtaggccctgtgattgccaagggcccatcagctctgagattccgattctaccattatgatttttcagattcaaccatcagagatctgctgagagtgtaccatctgtctcgtcagcactgggctctgcactgtggaataaacatacaaagagtgagaatacagcaaatagtttatctagcattcagtgtgtgccaagcactattttaaatgctttacatataagaactaatttgatcctcacagcagccacaggaggtaagttctattattgtcctaatttgaccgtcaaagagtttaaagcagagtttaagtaacttactcaagttcatatgctagtaaggagagaagcaggatttagacccagggacaggagaaataatatgatatgcatatttaagtataaaaatatgataacacaatccctgctcacttgaattcaccatcttgtggggagcaaggtgtctgaaggtttgaaaacaaagggacatgatatgagacccagagtggaagggctgtcagggccctttttgtcaatcccctgcctctaaggcccagcctttcttagccacccttggtaatagctgaggacggatgttgcccttggaaccattactcacgaacgtgccgcacacccctactcccccaaacccacctccctctccccttttctccctttctctggttattgtaattatttgggaatttacagaataatctgtcaccaagtcctccagaacaaattgaatgtcaggtttataaaacaacctaataaagcagatggcatcacccgctggtgaatctcttccctgtttcctgccccaccccctccccacttcagtgtctcagaaggctgacagattatccatttacagccagattaatcctgaacagtataaacatggggagaaaattacactttcttgtctccataattgataagaaggatacattaatctataaagcccggaggaaaggcccatctgtttgcccagacaatcgtggggatgtctgggaaagaaggagacccgtccatctctctgtctgtctgtctgtctgcctttttgtcagaaaccactttttcagaagctgccctccccttccctggccccagaaactgggcacctgtaaccttagacagtcccctggccctgcgtgggaggtagcaaggttcaaggacccacatctcaggattccaggccagggacagagactctgcctctctccagctttcatcttctttccagaagttatgtccattgcagagatgtccacaagcccagctctgtggtgtttctaagcttgcctttggtttcctcagaccagcccttgaggagattccaagcaaaatttgttcagtaagattctcattcaattccctgcctgctctctcctattgctttataactttttgcagatttacacacttccttccctgttccccccctcttccagcaccttctctgttagtggcagctgcgaggcattaattgtctccttgaggcctgtcagagctgtcaggaaatgtcccaagggccgatttctgccagtggagggatgcggtggagccagggtttctggtagactctgctcaagaattgacggtcccctcccagctcagaggtgatactgaaagggacacataaacattgccccactccctctctgtttggaggatttcctaaggctcgtccagtcactgtgcttgggatggcttgaggaggagatgaagggagcatggcaggtgggtggatttatctagagtgggagagagagccagggaaagtcctgaaaggtcccagctggccagaagaacctcattcgccagaaggatctcaatgagataaatagaaaattaaaatgaagatgggggaggaagacaggcagagcagacctccggaaaatgccgaggggccagaaaaaagggatattgagagatggaataaaagaaatacagaagtctatggcaagagctcgcagttcctgtctccagcatggatgggcatgttttggggtttggggatctctgctcccttagtctctactgtgttatttcctccggaggagagagggggtgctgcctccaaagtgaggcacattcctgacgcactccctattttgtgtggaggtgcactgagtgcccagggtctgagtaaatagcaggaatctcacaggtgggttgtgttttaccaaacgcttcacacccaccccccagactgcagactacctttggttaggcttttccaaagaggtggactgtgggaggaaatgctgtggactgaagtgtgggctcccagggccacttgtctctgcgggaattggtggacacaggaggacttccgacaaatgttccagtctttgtcttgcaactcccagctctttgtaccaatggtgcacgctactcccggctgaagtttgaggatgacgctaaccaggttgtccagactggactgtagctcttagagcactgatggtgcttgggctgttctttgggttccagagttgaacaaagttaaacagtgcttcttcccctgacttactttttggtattctttgctttccatctcttctctactttggctaatttttctccacttctttctgttttttttttccctcttgctctctacattctacaactttgattgtgggtttgatacaatctcaacgaaattgtaaatactaactcattttggtttcatgcttttctttttaaaataaatgattaagttctacatatgtgtatattttaaattgacaattgtaattttaaaggagaaaaagattagtgactctgattccagggttctataaacttggatgtaatattccattttcatttactaattttaataaaaattattacaacatgaattgtaaagtaataatatgtaaattatctagagaaaccaacaaagcactcaattttagcccctaaatgtagtaattaattctggatgatcatctaaggtttggagggtgaattttaataggtgtacgtttgggtaataaaatgaaattttttactattatttgagagtctcaaactgcttcaatcaattaacttgttctgtctaaagaggcagcttttgtgctgttttaacagtgaaagctgagtttcttggttctatcacttcattttcatagagccacaaccagcattagcctcccacatgctgtccaaagagcaggttgctgggttttttttgtttgtttgtttatttaaattgaaaagccttgtgttagacatcctcaaaagatacaaggaaagtgagaaatgctacttttgtccttaaaaagacaaggcagagttagaaaatgtgcctgtcccaaagatgtcattaagaacgttacaaaacaaaaccagctgttaaaaaaaaaaaaaaagtgacgtgacgtgcgagagaattggagaatggggaactgggttttgtatttgtcatatctcacagtttttctcacattgtcccctgtgcctagactgcctgtcccatactctatgtctcatacattcctggcatcccttccccttcccctccttggtagaagtgactgctcctcctttgggtggtcactgtgtctgctccatgcttctattaacatcttcttgcattttaatattattccatgtttgtaaatttaagattcaagaagctcagtaaaccacaaacaggataaactcaaggaaaacttcacctaatctcatagtcaaaatggtgaaaatcaaagcaaagaaagactctttaaagctgctagaggaaaagctacacattacatatacacaggttctgagggctgcaggtttcttcttgtcccatgaaggtcagaagatgggatcaacatctctaaagtactaaaagaaggaactgtcaactcaggattctacatccagcagaaatatcctgcaggtgtgaagtcaaaatagagctactctcagatgcagcaaaagtgagataatttattaccagaatacattttctgtaataaatgataaaggaaattcatcagaggctaaaagataatgataacaaaagaaagttggattttagggaatgaaggaagagcaacagaagtggtaaatatctgggtaaatataagagactttttaaaaaagttttaaaaaacacctaggaccattggaagcaaaacttataacataagctggtggagtttttaatgtgtgaggatatagtcaaatgacaattataacatagaagtcatttgaagggaatattaaaggacttttatgtggttgcaaagcttctatattttacttgaatgtgaaaatatatatatatagtaatctctaaagcaaccactaaaaaataatacaaacagatttagccacaatgctaatgataaatttaaaaagactactaaaaattatctaagtaacccaaaagaaggctgaaaaaggggcatataggaaagaaactagagggaggctgggcacagttgttcatgcctataatccgaggactttggtaggccaaggcaggaggatcacttgagcccaggagtttgagaccagcttggccaacatagcaagactccatctctacaaaaaattaagaaaaaaaaattagccaggcatgatggcatgtgcttgtagtcccagctactcaggaggctgaggggggatcacttgagctcaggagtttgaggctatagtgatctatgatggtgacactgcacttcagtccagatgacagagcaagacactgtctcaaaaacagaaaaacaaataaaaaaagaagagacaaatggaaatcaaagagtaaagtggtagaactaaatccaacaatatgaataagtacattaaatgctgatgatctaaacccttcaattaaaagtccaggattgacagagtgaataaaaaggcaagttgttattatatgctgccgtcaaatgacacatttcaaatgcaaaggcacagataggtttaaagtaaatatataccatgcaaataataagcataagaagcctagaatggctatttttaaatcagctaaaatagatttcaagacaaagagtatcactagagataaagagggacatttcataatgataaaagggacagttcatccagaagacatagcaattataaatgtatatgaacctagtaacagaaccattccaatcctggaaataaaaacaataaaaaggaatgaaccttgatacataaccgagatgaatctgaaatcattatatttagtaaaaaaaaaaagccaggcaaaaaatagcacataccatataatttcatttatataaaattctggaaaatacacactaatttatagtgacagaaagtagattagtggttgcttacaaatggaggtagaggcaggcatggatgttgaagaacacaaataagtttttggaagtgatggaaatgtttgttgtctttatcatggcaatttttttgaatgtaaaatggtcaaaactcaacaaactacatttaaatatggagtttagtgtacttcagttataactcagtaagattggagaaaaataaatgcctaaaaaaagtaatgagtacttactaaacacttctaacttcaatctaatactacaggagttttcctcttctttttcctttccttatttgtatcttgttcttccacaatgattctctccaaaagattcttagcctccctggttctcaacaacatcagcatatatagtcatttgccaaaatagtttgggaattgttattgtatatcattaccaaaacaaaacaaagttcaaactttctttgcagttcttattttatttagaacatgtccccctgagaatgtacagttcaaatactatgttctcaagagttacttggattggggggaggaatagcattaggagatatacctaatgtaaatgacaagttaatgggtgcagcacaccaacatggcacatgtatacatacgtaacaaacatgcacgttgtgcacatgtaccctagaacttaaagtataataaaaaaatatataaataaggtacattatatgcaaagttaaaaaaaagagttacttggattgatgtttcccttctgtatagacaccttgtcaactaccaaaggtatatagataaattcatttgtttctgtttatacaattttcctcatcaaacatgaggaaaacatttgatgatttaattttattttcacgtatagtaaaatatttggtgggtcaaaaagtaaaactaaacaaaaggtacatttaaagaactgttcccctttcttagcattttcttcttgtttcaactcactccctgccagaaaccaatttccctggcttctgatttatccttcctatgtttcttttgcaaaaatgggaatatatttttattttactttctttcatacaaaaatataacatactatctatgatttttactttaaaatatcctggcaatcacttcacatcaatttacagagctatttctcatttttataactgtgtattatgcctttgaatggatatacaatgacttattctaccaatctatcattcatatatgcataacagattcttcccaatattttgtccttataaataatactataagttgagaatcttaattaaaacatctgaaattcaaaatgctccaaaatccaaaactttttgagtgccgacatgatgccacgagtggaaaatctcacaccagactttgcttcatgggtcacagtcaaaatgcaattaaaaccttgtttcatgcataaaattattaaaaatatcgtataaagttaacttcaggctacatgtatagggtatatataaaacgtaaatgaatattatatttagacttgggtctgatgcccaagatagttcattatttatatgcaaatattacaaaatccaaaaaatatctgaaattggaaacacttctgttcccaagcatttcagctaagggatactcaacatgtatcatgaatgatcttgtacatattttgtttcacattttaggatatggatcttcaaagtaaattaatatattattatttattggatgaaaggttaaatccatacatagttgtgttagatactgccagatattagatattatattaaatatagccaaatcccttctgtagagttctaccattttgcattcccaccagcattgaaattgagtgccaatttttccatatcctgtcaacagaatgctttgtgaagcttttgaaattttgccaatcttgtaattgcaagatggtatctatgtgattttaattagcatttctcttattctgatgctctttttatatatttatggatgatttgtatatctttctttgtttccttgatttttatgagttgtttatgcaacaggcgtgttaaacctttatctgtgatatgcattgccaattgctaatattttcccattatataatgtgtcttttgactgtgtttttggcgatttcagccatgtaaaagttttttttaatgtaattgtattaatcaatattgtcttttattgattctgaattgggagtcataataagactttttaataagccagattataagataactcacctgtgtcctagtccatgttactataaaggaataccaaggctgggtaatttctgggtaatttataaagaaaagaggtttatttcactcatgattctgcaggctttttaggagaagcatggtgccagcatctacttctggtgagagcttcaagctgtgtccactcacggcagaaggcaggggtgagccagcttgtgcagaaatcacatgatgagagtggaggcaagagagagaagaatcaagagaggaagaaggtgccaggcgcttgttaacaaccaggtgtctcaggaactaatagagtgataactcactcattacggggaggaggcctcaagccatttatgagagatccgcccccatggctcaaaacaccttccagtaggcaccccctccaacatcgaggatcagattttaacatgagatttggaggggtcaaatatccaaaccatagcaccctgttttcctttaatcctgtgtgatttcatgtgtgcatcacacatctgatctatttgcagtttattcttggatagggtgtgaggtatggttccaattttatccttttccaaatagttatccaattgccttagcattatttattttaaagttcgtcttttctccggtgatttgatatgatacctttttcatataatacgtttcttatggacttcatctatttctttatctcctgctttattagtctgcctattagtgcagcagtaccatactgttttaattttggacagagcctctgtgttttaattgatgcactaaatccctgtatgggtattgtaattctattaattgaggagttatttctgctatgttatttcatattttatttttattctacatttattttttatttgttttctttatggtttctattggatagatcaaattttcttatgcttatttaaaggttttatcttctacttttttattatggtggctgcctttaatccaaaacctataattatatttatttgtcttgataatgtctacaattttagttttgaggggttagaacagctaggggagcaaaccagacaagtactaaagaaacctccatgtttgatataaacccaatgcacaggtccacacagacagggcatggaggtgtgctccgcaggggcaccgcacagacctgtgtgagggcaagcctggatgcatgtacaactaaacatcctcacagatacactttagtgtaggtggagacctggtttatgggtttttctgtttcttttttttctttttgttatttggatatgcttttttcttacattttctttgatccttgcttttttttttttacacaataatttgtaccaagtaatttgaccattcttccatcatatttctctctcagcactttcctgaatttatttctctttttatcgggtactcttccaagagtgttttcaaattgggattttgtgtggcaaactttctgaggcctcatattcctggaaatatgttcatggcgttcttgcatgtaagtgacaatttggctggatatgaaattctaggttcaatattctttttcctttaatacttcaaacgtatttttctccatgttttcctatgcccaatgtactcttcagaaatctaataaattgtgattccttacttttttaggtgactgttttatctttctggaaacttttagaattttcttctgatttttttctttttcaaggcagagtcttgctctgttgcccaggctgcagtgcaatggcttgatcttggctccctgcaacctctgcctccaaggttcaagtgattctcatgactccacctcccaagcagctgggattacaggcatgtgccaccacactcagctaatttttgtacttttaatggagacggggtttcgctatgttggccaggctggtctcgaactcctgtcctcaagtgatctgcctgcctcggcctcccaaagttttgggattacaggcgtgagccactgctcctggccttcttctgtatgtttaatattcttagtttcactgaagtattctaggtgtgggtttttctttattcttgttggcactgtgcaagtcctttccatctgaagtcttttgtcttttattcttatttcttcaaatgtttcctccccttcatgtttttcctcacctcctgggaatctcattgtttggatattagcacctcagtttacttataaccatattgtaagtaaatgtaagtcacaacattcttagcctttatttcatattttctatcttttcatctgctgctgctgccctgcgggagaacatctcgacatgatctttcagcttagaaattctgctttcagggatgtccatccagtaatttatcccttctgtttgtttcaaatcattcatatacaatatttctatttgtttcctttttataatttattctacctgttccatattttagtatcttctcttctgttgggaatatttattatgcttgtttaaaatcttggtgtatctgtctcaattatcctggttcacaggatgcgtattgttcagtttgttgcctttcttttaaagtggttttattccttgaggtcaaattaatttggcccgtaaacttatgttcccttggggctgtcagttattctgcgcagtactgtgtagtgaaggagcatctgaaatcttagtctattacttcctgctgaatttaaataagaggggagggaatgagctccaagccagagagcccctggttccacagaaaccctcttgatatgttccagcaacctgctatcccccttcccaatttaggatcccttttagatgctactttcttactgtgcaacccctctgtccagtattttcctttcaaagaagcagacttgggaggtggccatccctttagtagatccagcaggcttcagggttaaaggggcagcagaggatgtaggatggatgaacgaatgcccaagggcagacagaagtccatttctggtcccattagctcttatcctaatagggtttttggttttctctgattatattcttggaatctctgaggacttggttatgatgctgcttgttctaggtagacaatggtcaccgtgtgtgtgtgtgtgtgtgtgtgtgtgtgcatgtgtgtgtagagggggtacaagaccacaactttggagcaactaatatcccactggggcttctcccttttctattcccattcatccacccacccgtctccttcacacacactggatctctgtcttcagaagcctttggtcttcctggaatttctcactgttttatctttggatcatcagatccatggtatattttctctgctgtggtttccccaagattaattttggaggtgggagccagtagcctatgctcattggccatcttgtcagaaaacaatgactcattcttttggggggtaaatgctcagtcttcgaaatgtcttctccctctccctggtcctcttcattgtgatagtgagtttacaagaccttgtgcagctgtggagagaaggatatcttgaatttacatcatttcaaattgcccagctttctcctgcagaatggctgatctgggcttgtgctcagcctcatgacccctggaggtttggctgtttgggggattatgctggcaccactgtcagagtttatggtctggtctgtgactctagatgggaagcagctagagccctttcatcagacatcaagcttcagctggtccatggcccaccaggcaccagggcatggggtggtcctataccgcccctgcaggccatcaatagatgtagcagggaaacaagagcacagcctcatgcttgcccaatggttgcttgtatgctctgtgccatgtcggatgtgcctgtgtgctggacttctgttaggctgaagcttccagcctcccctaacctacacctgacagtgtagtgccatccttctaatattcttgattgccccacatttatatagatgcttccacagtgtttcccttaactaaaacctgtagagttctgtacaaacttctgttacgacctctctccctttgcatcgtaagtatttatgtttctgtctccccagctagagagtgagctcccttaggggggaaactgtgtaatatttttccttgcacttctcagcatctggcctagggcttggcataaaataagcaccaggtaaatgtgtgttgaaccaaactgaataatacaaactaaaaacagataagtgctttaaaagaagtgtttgggggagaaaggctttatttatggtttggggatatggaatggtttcttaagaaggtaatagtggagggtttagactgatggaaagagaacattcagggtgaggggaacactgtgagcaaaggcacaaagatgggaaagcgcaggatgttcatttgttccctttcagggcaggaattattccttgggcatctttgcaaactctctgaatagttccttgaacgtaagtggtgctaagaataaactgcgccgagtggaataaaatccccatcttctcctgcatccctcagaagtgggggtgcccagtggtcatagaagacattaaatcagaaagaaacaggtctttctttggtacagacacatccaagattataatattacacaccctatatagtcaaggttgctgcaggaaagaaatgacatactcagacaagtccattgaggataatttaagggagtgctatttacaaaggtgtggctattaaaggaaaccaacaagtggggtaaggcaccttggcgagagcaaagttccatccctgggcatgctgggaccagggaaggaggagttactctgcatgagaccggggctgtccaacccttagatgcattgccaaactgtgtgtgcatgtgtgtgtgcatgtgtgtgtgcacgcatgtgtacacatgcatgcatgcagcagggtgatcagccctctcatcttcttcctctggagtctcctggaagacccagttggaagcctccaggagcacagagcagggtggggaagggaggagaggagattggcagatgcagaatatctagtacacacccaaagtctcatttaaatctcacaacagcccaacgaggatgactttagtattaacaactatgtattattggtgaggaagataagccctaaaaggttgatttgcccaggatgaaaatgctgccactaggaagacattgattttcactccatataggaccaattgttcggtgtgtatgtgcatgtgtgtctatgtgggcaggggcaggtggtaaggacagtgggacacacagcagtctgaagctctcatgggccaccccaaaatggaatccctggagggggctggagtagtctgggcctggcattgtggttcagaaacttaaccctgggacttggacacaggagaaacattagggctccagccccaaaaaaggagatagtggtaaggaacagtgagctagagcagggactctcaaacttttggtctcaagatccctttacagtcttaaaaattatgaaggaccccaaagagctttcgttaattgggttgaatttcaaacagtattttctgtattagacattaagacaacaaaattttaaatacttattttcaattaatttaaaaataacattctggctaatacggtgaaaccccatctctactaaaaaatacaaaaaaaaaaaaaaaaaaaaaattagtggagcatagtggccagcgcctgtagtcccagctactcgggaggctgaggcaggagaatggcgtgaacctgggaggcggagcttgctgtgagccgagatcgcaccactgtactccagcctgggcgacagagagagactccatctcaaaaaataaataaataaataaaataaaataaataaataaacaaacaggccaaggcaggaggatcacttgaggccaggagttagagaccagcctgggcaacatagtgagaccgtgtctccacaaaaaatggaaaaaactagccatggcagagcatgcttgtaatcccaggtactcgggaggctgaggcaggagaatcgcttgggcccaagagtttgaggttgcagtgagccatgatcttgccagtgcacttcaacttgggtgatagagcaagaccctatcactaaaaaaataaaaagtaaaattgctgggcacggtggctcacgcctgtaatcccagcactttgggaggctgaggtgggagaatcatgtgagcccaggatttcgagacaagcctgggcaacatggtaagacttcatctctacaaaacatacaaaaattagctggtagcatgcactgtagtttcagctactcaggaggttgaggtggaagaattgcttgaacccaggaggctgagactgcagtgggttgtgattgcaccattgcactccagcctgggtgacacagtgagatcctgtctcaaaaataaaagaaaatagtaaacatattagatactaatataaataacatatttttatgaaaagtaacattttccaaaacaaaagaacatcagtgagatgagtggcattgttatacatctttacaaatctctctaatgtctggcagaattttcccaccacctgcttttgcaatcaatctgttgggatatgttgttttggttgaaatatgggaagaaaatctggcctcatccagatatgtagttgcaaaaggtaggattttttaatagttgtttcagataattgtggctatttatctttgatactacacttaaactcaataaatggtagtttcttaaagattatttacaatgtggaatttgaaaccatatcgacgaacattttacacttgattttatgtactgtatgaaatgcatgaaaatacactggtggttttacagcttccaatgattcctttatccatgtgtaaatcatgcattggacatttggaaagtattatttcactgagttatgaagatcttccaaatgttgacacatttcattatacaaatttttttttaaaaagccaagacagatttgttactattaccactgacctcatcaggaaagatcttaagtattgggatgctatcaagttcatggtggtgaacacaaattttccaaaattctaattttcatgtgagagctcaaatgttatcgttggccacaaatctgtcaatcgttttgcttaaagtgacaggctcactttgttcattttcaagacaatttctaccaaaaacacaagtattaataactgtggcatgtcagttgttttttcaggtaagaatggtgttctgtgaaaggagtggctagctcagctcaaagctcaaacaattgcacaagcgtttcttctgtgagacaagcatcacgtttcagcaaaaacgccgtgtgtgtacttctaaggtagtcacacagaatattaaaaagatgtgtactcaagggttgagatggaataaaattagtgattgctactgcttcgtaaagaatattcataaataaaaatggcttttaaaaaaactgtgagggtgtagtgacgagaaaataaaatgactattatcagacttcgtactctcacttggttgatgtgggtgtcaacagtttcacccaccaatgcctttgcatccccagtgcaaatgtcagcaccatgaaaaggacaaatcatgtgttagtattatcataaacatattttgatctcatggtcccctgaaagtgtctcggggaaccccggagtcttcagccacactgagaaaatcaggagtagatggcatgagaccggggacggcagggcccccctgctggaggagctgcttccggcttctgccccatgcccctcatggaggctgggcttttgttgcccacacagacggcagcatgcaggagggtgggccagtgtcgggtttgggggttctgtgtgtgccaggggccaggccattcatctgaagtctgtgcaggttggaggacacagcctcagtggagagtggggattgaaaataaaggggagattgtctggggcagcagttgctagaagaggaacccagcatggacactgggttgggggctattttcttagaagatactcaggagcctgcaggctgtaggtgtgctgaggtggctcagggtgccagccccgccggcctggtccagggccttcacccctcagcgtctcagagctttcatttcctcctttaggtgcacagaaatggggactctgtgagtggaggaagtcatctcccaatctaggcttgtggatctgaagaggagataggaattcgttttaggatctggattcagtaaaatcttacgtacatattacagctggttggaactgcacaagtccacttattcaaggactttttcccacccctgccgccctgagacagcaagaccaatctcttctcttcctcctcctccttggcctactcagcatgaagatgacaaggatgcagacctttatgatgatccacttccgcctaataaatagtaaatgtattttctcttcctcatgattttcttttctctagcttactttattgtatgaatgcagtacatcatacatatacaaaatatgtgttaatagactattggtaaggcttctggtcaacagtagactgttagtagttaagttttgaggagtcaaaagttatatatgaattttttttatttcaataggtttttggggaacaggtggtgtttgagtacacgaataagttctttagtggggatttctgagattttggtgcacccatcacccaagcagtgtacactgtacccaatgtgtagtcttttctatggattttgaattgtgggggaattggcgcccctaaatccctcattgttcaagggtcaagtgttcttttttataagcagaatcttcatacacacaaccctaattgattctgaagtctgatgactcacagttcccccattcaagccaatgtttggtctattccttcctgcctcccaccagaaattcctgacaccctcctcttccacccccatgtcaatccacttccctcccctgctttacacttggctgagaattcacgtcttccagaaatctttctccattactcttcccctctgtcctcccttgtagaaaccgctctgtgattaatttctaatcccctcagtgttcataatacgtgaagtaaccatctttgaacaccactgtgtgctcggtactatgctgcccaccttacatgtgttgcttctaattctcttaaatttttttttctctttttaattagagacgaggtcgcactatattgcccagacaggtcttaaactcctgggctcaagtgatcctcccacctcggttccccaaagtgtttggattacaggcatgagccactgtgcccgactcttctaattctcataataagagttactctcctctccccgtctcttcctctggctctaacatccaatctatcagcaagccctgctgattctacctccgatacataacttacattcattctctctctatctccacaaccacctccctaatccaagccattttcctctcctgcctctactacagcatggcctctttctagtttctcttccagcctcccacccactagaatataagctctatgagagcagaccttgtatgtcatgttcaggactctatctccagagcctagcacaatgcctggctcatgggatctgttcaatgtttacttttgaatgaatgaatgaatgaacaaatggaagaagtgaataaatgaaggaatgtatagccattatgcagatccatgaggcttattaactaatgggatcctgatctcatggcctcactgtgcaaaggggcacactgagattccagctatgagtctgggccacgaaaaggtacaattaattgtaagctccctgagaatggatgatggctaacatttgaacaggtccttggaccccagaactgctctgattttgaaagaggagactcagatttctgaatagagtccatcagtaatagttgtgtgatcttttaaatgagtaatatcacttactagagttactttcccagtcaattggggatgatgatgtactcatctatacctcaatgtagcgacagggaagcagaggggctgtgccttggacaggggtggtggcagtggagttagagagaaggcatgaggttgagacatgtgttggaggcagaatcaacaaggcttgccagcgtaaggggtgattgtcatcattcctgactgggggacttgggctggactgcagtccaaggtgaaacacagcttccattatttgtgcacctttgtttcaaggtgatagtgtccctggtgctgccactttcttgtttgtccatgagtaaagccttggagtctcttttggcctcccttttgtccagtgtagcctcaggagcactgcgccttcctgggtgaggctgccttccttttcacgctccaattcctactccactccccgccatcttctcctccttctctgtaggagcgtctcctcaagccacaggtcatcagccactccctgctcaggccctgcaagggcttgccattgcttagagacacaatccaagctcttcagcttagcctcggctaagctctcctcacccactcctacttctcttttctagccttggtggccttgttcctcctcaggtcccctgcacttcaagcagactcatttacccacttccattttcagagagggctcagttgttgtggaatcttaaactcttcgctctggaagatatccgaatggcacctaatccagcctctcatccgattcaggaatccctgctggaaccatctgtgatacaattgttttccctgggctgggaatgttggctcatgcctgtaatcccaacactttgggaggccaaggtgggtagatcacctgaggtcaggagttcgagaccagcctggctaacatggcaaaaccccatctctactaaaaatacaaaaaagttagccaggcgtggtggtgcacacctgtagtcccagcttctcaggaggctgaggcacaaaaattgtttgaacccgggagatggaggttgtggtgagctgagatcgcaccactgcactccagctctagcatgactccatctcaatttaaaaagaaaattattttcccttgattgaaacagtctccacagattccatcctccaagtagacaccaatgtctctcttgcattttgtttattttgccaccttgtccacccttactcctttcattcaaattcccccactctttaaggtcccattcaaatctcacctccaagcagctttctctggtcaccaagcacacaggaatctttcttccttctctgttcccttggcatgatagttagcaacacaagttttattaaacattgtgataaaacacatacaatttgccatctacagttctttggctttaagtacattgacactattgtgtagccatcaccactatccatctctagaactcttttcatcttgccaaactgtaactttatacccattaaacagtaactccccatcccctcctccctacagccactggtaagcaccattctactttgtccttacaaatttgctactctaggtaccccatctaagcaatatacagtgctatacagtatttctccttttgtgactggcttatttcactgggtgtaatgccctgttcatctctattgtagtatatatgataatttcattcttttttaaggctgaataatattccattgtatgtatatgccccattttgtttatctattcatctatccgtggtggaacacttgggttgttccagcttttggctgttgggaataagcaacacacattttgcatcaaacagaactgagtttaaatcccagcttcgttaacttcctaacttgggtaagatgcctaaccttcaggagtctcagatttcttaaatgtaaaacacaatggtctgatctgtcctttactagttttgtaggcatgtgaagtggctggtgagcacgactgacaattggtaagttctcgatgcatgctaggaagctactagaccacacaagtgtcccttaccaatcagggctctgtattgttagttcctctgtataaaatctcaggcagttctatttccagaactaatgctagattctcaaggtctcagttccaagaacttgaccctaataagtagccagtaactcttacttgattgtttgacttggagatggttgtatgggagtgtgtaaaagtgtgagtgtgtaaaagcatgagtgtgtgcactgtatgtgctccaatagggagcactggagacggcgtgagggtctgtgggtggtaggcaggactggcggcatacaaatcagtgggagtgagggctggggtggggttgcaggtgggtgttttgtgcccacttgctctgcattcgcttgtacctcaaccccttagggttgcacatgctacattctcagtagggctgggaatgtgtgcagagtgtggaagtgagctgggagttagggaacaaagtaggagcacatacagtcgcagattctttgttctgttcaatgacttcccctgccccatctctatgcagaccctaaagagttgttttctgtgccagcctggcctgcccattcctgcagcccaacagaaggacgatccttacttggcttttgcaaaccccggcctggtggcaatgcgagtcgccttccagcgtttcttcctccccttgcagttgccactttgctttggcaggtgtgaaatattaattgcctcactggggactggactctttctgtctgtcgtgtctgaccagaatatcattctctcctgcaaatataattatggggtaggggaggcgggctgagtgtacgggggtggggggtgggctgccacatggggaggtgggagcgcatgtgggaggggtgatgagaagggactacagctttttttcttaatcgcctctcgcctgtctgttaattaggagccgtgctttgctacatgctgtgatattttggttaattataaagagaaaaggacaaatttgtcacgtcttttgttttcgttccaccacgtctcctggtgacagcggtgtgaaggctgatggactgctcaggcagcagcaccagatgctcacacacaccctctgccaggggcaggcagggaggggtcctcagggctaggaggcagccagggggccaccaggcaggctggtgcacatggggctggtctggactgggttcacaaggggtcaaatggagagattcacattcttgaatgtgaacgtgaagtggatgccaggaaggagtccccagtcccactgaaggagaggaagggggagatgttcattcctccgttgtccagttgggtgattggcctgacaccaatgccccagggatcaaggctgaacttgccgatagcaatcagagcagacaggcaggctgtgacccctcctaggatcttgaggcagtggggggcatgttcaccttgcagagtggggctgagtaaaatatagcatagtattctatgagcctgtcacaaacgggccacccagggatgtgaaaggatgtgctagttctccctgctaccatttattagctaaagcctatttcaggctccagcttatacattataccccatcccccaacacacacacacacacgtactgggttaggagtcaccttctctgggctctgaggcttactaagcttctatcatgtgatggttaattgtatgtgttaacttggctaggctacgatacccagctgtttagtcaaatacaagtctagatactgttctgaagattatttttatttttacttttattttttgaggcagagttttgctctattgcctaggctggagtgcaatggtgtgatctcggctcatggcaacctccgcctcccgggttgaagcaattctcctgccttagcctcccaagtagctgggattacaggtgcatgccaccatacccagctaatttttgtatatttagtagagatggggtttcatcacattggccaggctggtctcgaactcctgacctcaagcgatccacctgcctcagcctctgaaagttttgggattataggcgtgagccaccacacccggcctgtgaagattatttttagattgacaaccaatacactgaataaagcagattaccctccataatgtgggtgggcctcatccactgaaggtcttaagagcaaagactgaggtttcctgaagaaggaattctggatcaatactgaaacatagaaatcgtacctgagtttctgactgctggcctggcctacagatttgagacttgtcagccctgacaattgcatggaccagttccttaagatctatctatctgtatttgttctgtttttctgatgaaccccgatggatacatatcccattgcatctggttgtggactttcctgctttcctgaccatctccttcactagaatgtgaggacagaaactaaactgggtcctgtgtaccacggcatcccctgggcctcgtgtagggcctgcttgtaatagaccttaatatgtatttgttgcacattgaatgaattcatttgggaaacaagaaagacgtacatccccgcaccaatcaaataaccatccaaggcagtacaggcagttcctgacttataaataggtttagttccaaaaattcatttgagttagttgtctgaagctttttcccataacaacaaggatatcagtgctggcaagcctcctgggctggctgccagaaacctatttaacccatagtatagattaaacactgtgcatttgccatgaaaaatagtagaaaacaatattcttgcaaggctagtaattagaagagaagtatgatagtattgaataaaaataggtaaaatttttcatttagaatattggagttttgaagaaaaatggttacaaaaggatgagcaagtagagagagacagcagctgctccaggagaggccgtctttttttcccagccacgctgtgtcttgcatgagactcctggggcctgggcacagagagaaaagaattgagactcaggaggctcagtgggtgagaaaatgcaaagtggcttcacagacacagggctgtgggagcagatcgacggggaacttgggagatgaacttcagggccttccgacgccttgtctcaggaacatgctttgagaaaaatggtagcatcctttccataactcagtctctcttccctagtttccctgaagtgtgacgttttagtatctggagctcagtgatccccatgaatgagggataaagtttcactcttggtattttctaactagtgctagggaaagtcctgagacacgatcacagccactgcttggcatacagggcctccacccaataagcaaactggagattcctcagcctctcgtggacacccacatctcattcttctcacagcagagaagctctcccttcagcctgagctgtcttctttctgctgcagtgcagcctgctccctcctaccctggcctcaaggaaggtgggaaacatcttctgcatttcaaagtcctcactttgacttatttggccttcatcttggcatggaaggtggcaggcagaatggaaatactccccccaaacaaaacagatattcttgcgtgtgtaagggcagaagggacaagctctctatcccatgagactaggggccggagcccacctgcctttccccacaacttttcctgctcaaacccactcctcttgacacactggaatctgtattatatatatttttaagaaaatacaatgatggttgtctggttttgttgtttttacaggtgttgtggaataaaaactgtaagaaaattaagtatttaaaatgttccaataaagtggggttttttgttattctaatatattattgtgtacctattgtaaatatgaaacactcctattttgcaagctgaggacacaatttgtactgttgttatatataaataaagtttactgaattaaaaaaaccttaaatctttaaataaacccgattgttcagcagcatatatgcagaataacattttaagggcatatttaagaatggtactcatggaaagatgagctaagttgttttgagggagttttagaattctctctggagccagagcttattaatgtaccagtcatcatcatcaacataacacacacacacacacacacacacacacacacacacacacacacacacacgagataccgtggcttataccagcaggtgaacactgccccctagccccaagacctcagaatacagctttcctccaactggaggcagctagtgtactccatgagttaggaccccttcccaggagagaagggaggtctcagaagaatgagatcctcctctgcctccatgcttaatacatgttcttcatgtgtttgtacattcatgtatacaaagtgcattcttgtgcttgtacaaaacgtattaagcacggcctggcactgtggtaagtgctgggggataacataataagtgagaaagacatgatccttgtcctcatcaaccttttagtgtagtgaaaagcataggcttgcttaaaaaggaatgtttcaccatgccttgagaaggggttttatggttgcttttttttggtcattttcagttaaaggattaaaggtaaataaagggaaagatgccagatagtgtgtgcttttagatccagtgcaggtaagacaagaaggcgggccctgcctaggggagaacagtagctgggcagacaaagtccagaggcagcagaaacatcacaattccacagtaagcctgagaggtagggaattgatcttaggactcctaatccttaggggtcccttaaccctaggaggtcatgcctcctcccctcctctgtactttcatctattttacgttctggtgttccaacatgtgtgggtgacacttcttctctctggtaagagaaatagatgagaataactcaagtatccatctgacatctcaactgagcatgcaagcaaactgctgctcactatttccatgataatgggaccaggagagttctgggtcttcaaccttataccaggcactaagagtagagcctcctgaaggatgaggtgcaggccctgccttcagagtgcctccagtctaacatggacagccaacacacaagggagaatggggcctgggacttgtaaaacaaaacatgtaaacaagtgcatgttggtaaacatagtgtgtgcttacagcttcaaagagatcataattgggaagattgttagtcccgacttagcagcctctgagttcacagtgtttgtgggtcccccatccacaccgcacacatgtacacacacacacccttcccagatggaatggagagatgcaaaagctggtcctgagggtgagaaaaatgcaaacataacaccatgaggagtcaggaggagaggagaagagtgcagtgctgaggtctgcatgtaattagtgtgtcattttcaacaacacagtgggcctcaggcctggggagtgcacccttgggcctggggagtgcaccagagctttttactaactttaaaccatcctcctcttctctctgaaatgcaaacctagaaccctggaggcactcgagtgtctagcagtgaaaaatgtgtcttttctcagtaaaagcaacaatatggccctggtgagctccaatgtgggacagagcagttagatgagtcttgcctctgtcactgcctgactgggctcctggcttcacaagaggctgggatacagggaaatttggacagaggaggacgtttctcagtacaggatccttacttccctgagttttctccaatcttcttgctgctcccctcaccccaccgccatctgtcccctccacaacttggacttagggtatccctattattaaatacctgctgcagaaactaccatcctctggcaaggaagcaaaggaagaggatggaagctaccaggtggtctgtcttgttcactgtcgtattcccagaacagagcacagaccctggcccacagcagatgccccttgagtatgttctgaataaacagatgatggaatgaatggaacttgggaaccacctaccaaatgccaggctctggaacatcctcccttgtaggcttctcatgctcacatgataagagttttccattttttagtctgagattcagagaggttaagggacttacttaagactgcacagttacaaagtggtagagccacagaggtctgattccagacttcacattgcacaggctttttccactgcactttccacactacctttcattagctctagaaccattgaatacttggaagtccaccccagaaatggatccttcctcttgtaacaagaagatcctatggagacactcttcctcattcaccaatagtcatgtttgttcaatgcaattgatatctcttcctcacttgctatgagcatgacactagactaggtactattaggaacacaaagggagggaaaagctaagtcctgaagttgcagctttccctgggtttacactctaatgccaataccaaatcattattctataagaaaaagattcatcccttttattaggggtatttctatctcatttttaccacaaatgcaaaataattttgccaaactgtgtcagtagaattctcagagacctattttcctcaatttgagggtaaaacctgcatgataagacactcaagagaatttagggagatgggtgctgctgattgtctgcgcttgatcatatcaacaccacgagctgccaaacatctcggctcagcaagtgagctgaaagacagaggaggcttccacctgtcagcagccaaatgagcagcccaccaaagcacatgcacagaaatttctactgcatgtaattgcattcatcttattcctggctttgctttatgtctctgtctcatttatcttgattcctcacccctactcctttctaattgctaggtttcatgtatcccctgctaagagcataagctttggattccgattgcctcgggttgaattccatcctcaagctgtatggtctggggcaagttatataacctctctgtgcatcaattttcaaatcaataaaatgaggataataatatgcatccaataaggtttttatatgggttaaataaggtaatgtatgtaatggactaagtattacaataggtaaatgagcaggagagagaatgaaccatacatccttctttttttttttttttttttgagatggagtcttgctgtgtcacccaggctggagtgctgtggcgtgatctcggctcactgcaagctccacctcctgggttcacgccattctcctgcctcagcctcctgagtagctgggactacaggcacccgccagcacgcccggctaattttttgtatttttttgtatttttagtagagacggggtttcaccatgttagccaggatggtcccgatctcctgacctcatgatccgcccgcctcggtctcccagagtgctgggattacaggcttcagccactgcacccagccaccatacatccttcttttacaggcagcccaggaggacctacaggcaggaattgatgagcatctccatctgactgtgggaagaagttgaattaatagaagttttggagatgaaagttggtgcctgagagttaagtccttaggagactagtcatggatgctaacataggaaaatagaagatgaatcaaggtttcacccaatggcagaaccagctatgaacctgccagtgaacatgctataggtaaatgggaagtggcagacagaagtggatcaagcctaatttccatgtgctaaggccacagacagggctcagttggctacaagagtctgttgatggcctcctgaaagcatgcccagatcaagggtctgaaaaggatttggggcctactaggaaaggtagttcttcaccctgagagccagagggcagggccagcccacaggcagaggataacagcaacagaggggagcaaagaggctggaggcagagggcacagaaggaccccagaaggactattcccagcaagaagtcaaggaagtggagtaggaaacgggctggagcactcaccagacctgagagggggattcacctatctcccctcaggaggagtctgggcacctccacactgagctggttttaggtaagtgtattagtcagggttttccagagaaacaaaaccagtaaaccaatagagtgtgtgtgtgtgtgtgtgtgtgtgtgtgtgtgtgtgtgtgtgtgtgtgtgtaagggggtggagattttaaagaattggctcatgcaatcatgggagctagcaagtctgaaatctgcaggtcaggctggctaaaaattcctgcaaaagttgatgatgcagccttgagtacaaaagcagtctagagggagaatttcttcttcgggaaacttcagtctttttcccttaaggtcttcaactgttgatgaggcccactcacattttagagggtgaactgctttactcaaagtctacagattgtaaatattaatcacatctaaaaaataccttcgtagaaacatctagactggtatttgatcaaaaaactgggcactgtagtctagccaagttgatacataaaattaaccatcacagggaggaaaagaccagtcaatccgttcatcgaacgctgaaactaaatgaagtgcctgtgatccttaaatctattcactttgatgatttcttgtctggtttcttttgcccttagtctctgagtagaagatgcttttgaacgatcctaacctttactgggtaaccaaagaagaagaggaacagacatcaatgggtatggagggcccttgagaggcagagagggtactggctccagatcagggaagtggacgactcttggactcatcatgggaaataataagagggaaaatctggaagccatcccccatctggttttcttccagaaatcattaatgtctgaattatcccagaccatttagaagagccccacctaagaggcaaacaccagaaaaccagtaaacaacaaaaacatatggctggttatttaatcctcctgaattgggcagtactccaatcttcctgatccatcctcccaggctcctctctctttggttctcccatcttcatgtggctccattttgcaggttctaattgccatcacaggtgtccctaacttccatgacccattttagaaaagctcacctggaactctccttttgccacaatcattatcatcatcctctagcatgctgcagcacccaaaagtgcccctggccccacagaagagcctacagtgccacacactggagggtaagaagggaggctccccagcctgacggtacctgacttctcctctgcctggcactgaccctgagtgattttaaaggccacaggatcttttcagagctgagatgtgggtgacttcatgaaccctgagcttcagtggctgtgggaacccagctcgtgcccctcctcatttgagtcagcccttggttttcatttcaactccatttccctgttcgaatggtaaggatgctgagggagaatagaagcacacattgtcactcctcttggccatttccccaaaaatgtttttcttccaccttaaggagtctccctggtcatttgtttatttaactaaatctttagcgagtcacttatatgctctgctgtgtgctaagcagaaaggtccaggacctgacctcttactcttgtgagcttccctggcagtgatgttcatctggtagcaatgatttagtgtgtctattgcactttcattgtgtaaccagcactgtggttagcacctcacagacatgatctgattgtctcctatgaaggccagaggaaacaactggcattcactcccattttagagatggggaaactgaggctcagagagattatataacaaatctaaaatcacacagaggtcagcgacatccttaggatttgaccagatcttcacaagctgtggattcagtggccatgaagaaaggcccgttgctctttggggctcagggtagggctgttccctgtttgagcacatagtgaccaaagcagaatggctcttcctgctcacagccagcctgtgacagcagcactggccctctggcccctcccagccagagctaggacaagacacagaaatccacaagactcttggagaagtgggtcctgttgctgagtcaatgtcctcagcaatcggcccctgccactgggcctgtctcctcctaaagccctatctgctactaaaccacttgagtggccttggcaaagcctttttctttgctcaatttcagctttctccttcataaattgaagggacttcgaaaagatcagtagtttccaactttgtatcaaagaaaggctcacacagaatccagatccaagtgcagttacactgatggaaacagatgggaaggcaaggccctactcactccaccttcccttcccacaccaggcctcccttgaccttgcccccactccctgtgttgggccctgtatgcctctgcacaaccctacggctccatggaatgctactggttctctaaggtcccacctggttctgaaagtctaccaccctccctgtcaggcagggggcctctgaccacagctgagatataggccacattacgagaagtgtccaggtcaaactggaattagtgtcctagggttccaagccgcaccctgccccggttacacttgccccctgtgcctgtgtcttggtttgctttgagtcttctgtgaactgagacagaaatagagcaaggtggtgagataattacgacaggtcaaacagtccacagactctgccagcacagaatagcaacatggtgatgactctggcctgttccaagagcagctgaaaggaagggccagctcaaacagatgggaaaggtaaagacatgaggaaggagtcctgtgagtgagaaacaggacagcctcggggctctgggggccctcatggcccttcctctcccttctataaagcaaggtcaaatagaccccatggagcatccagaagcagaggcacacagcaactccctagatggaaaaacatgccgaaggctcaaggttgggctgggcatgggtcttaatgaaggttccctccgggcctttcttcagaggaccaaaccctccatctctgacctaattctccaaaactaggaagctggtggaggtgatgtccacagaggcactggctgactctgtaaccttgggcaagtcactcaacctctgaggagccctgcatctctgtgcttttgtgactcctgtgattatcagaacagcacaaataaaatttgggaacctgggaaagaaagcatctcacaaagaaactcaaagtaaacaaaagaaaaagtcaaagtcagagccaggtgcctagatccctagcccaaagttctgtctgcatagatggaagactgtaagaataatactttgtgctatttcatttcccaagccccccaaaatgataaatttccccacaaagcagatctgccttatactcccacgacgagacccttccctataaatctgttcatatgttgaccctttcagacagcatttaaaatatgttttcttaatttatgaattcacatgatggaaaactacaggccattaaaaactgagtgggacaactgtgtcaatatgtgaacatgtgagtatggggtaacttcaagtggaaacgtggagactccaccatacggagtacacagttgtgtatatgtgtagaaaagcaaacatgtgcacattatttattgaccaagattagaagtaaattgagattgtggtttttattagtagatattcaataagtgagtgcttattattttcagattctggctgtttcagccctctcaaccactgttttgatagaaggtggccagtcccgcagaaccctttttaaagcaatgggcttctgcccgtcttcctcctaccaccacgccccaccttaccctgctacatacacaagctctctcccctacaccacagaagttagcatctgcaggtaacaaggaaactcgcctgcctgactgggacgaggaaggtgcggtggtctggggtgaggaagggaagcagagctcccacccccaccaagcgtggtatggaccccactaccctgggtagagagatggccactgagctcaggctcaggtgaccagcttcaaacctctgtcctcacatcaccagattctgttaccacgagagctggagttggagacgaagcaaagctcaacaagcctaaaccattttctccaggggaggggctgtggtggtcgttctggctgagtcaactaccagtggctcggaagtattgattgtggattttggaactggacacaactgggatgaaaaataagccactttgtagtcgggtgatatgtggtaagtttcttactccctctgagcatcttctaatgtggaaaatgtggctagcattagctcaggcagttatggtaaaagttagaactaaggtatataatgtcctcatcacaggcctggcacaaagcaggcagctgagaaatgcagagatttgtagtatagcattattatcttgtacacctctctgaagctttctgggccctcactcttgcctggggagtctggagtctgggaccccctttcagccagcatctggccatactgaactgagagaaggaaagtggcagggatcaggaatcagtctccattggcctgggtgttttctgaactaaaaccaaagccctggcatcaacctgctccatttgagtgccttgaggcactagaaagcttccaagcagagcctctgaccaaggagctgactctgtattcacgaaatgaatcctggttttgcagaaagcagatagtgactccgagagccatctggaggggggtggcacttccctctagtactaggaaagacagacagtaatcagatcaatgagaataaatagatggcctagaaacagaccctcctatatataaggacttaataaatgataaaagaaacattataagtcattggagaaggtgtgagttatgcaaaaactggagtttgggaaaattgactaattgaaagggaattaattttgattctcatctcacagtacacactaaaatcccatttagatcaaagagttaaagctgcaaaaacaacataagggggaaaagaaagtagcatgtcattttcccgaatggtaggactgaatagtataaagatgcaaatgcttcatgaattaagatatatatttaatttaatcctttacaaaatcccaaatgagattttttttttctagacagcatgactctaaaatttatctggaaaatacatgaacagaagtagtcttttttcctcctaaaaaacagagtaactatgggagatttttctgccagatattaaaatgctatatttcatacacaaatatgttgtatttttaaatgtgtgaatgaataaagatacagtaattaaaacagtgtgattgtaatagaagaaccaactgaacagaataagacagctcagaacagtctactgtatatatatgtttaaaaatttagcgtaagccaaaggcagcatctaagccaatggggaaaggaagccttgttttttttttccttaaacagggtctcactctgtcacccaggctggagtgcagtggcacgatctcagctcactgcaacctctgcctctcaagctcaagggatcctccctcctcagcctcccacgtagctagaactacaggatgcacaccaccacgcccagctaatgtctgtattttttgtagagatggggtttcaccatgttgcccaggctggtctcaatttcctgagctcaagccttgcacccaccttggcctcccaaagtattgggattacaggcgtaagccaccacgcccagccaaaagcattccttaataagtgattcagggataaatgtttaactatttggggaaatatcagtctaaatccttaccatgatgcaacacagaacaaaataaatcccaaataaactaaaaaattaaatgtgaaaaaatcaaacctgactgggcagtggggttgctcacacctgtaatcccagcactttgggaggcctagggaggagaatcacttgagcccaggaatttgagaccagcctgggcaacatagggagatatcacctctacaaaaataaaagaaaaaacaattctaaaccttcttaaccaggagtggtggtgtgggcctgtagtcccagctactccagaggctgaggtgggaagatcactggagctcagggggtcaaggctgcagtgagacgggactgccccactgtactctagcctgggtggcagagcaagactctgtcccccgacctcaaaaaaaaatcataaaatacttagaataaaatattagtatgtttatctcagtgtggagatggaatttctaagtataaaagtaattggaggaatcacaaagaaagaatagatatatttggctgcatataaattcaaaccatatctataaaaaacatcatagaaaataaaagtaaacagcaaaatcaacctgagaaaaaatgtcttcaacaaaaacatcaaaaagttaatgttcttaaaatacaaaatagcactcatacacataaaaagccccactaaacccaaaagaaaaatgtgcaaaggatgagaataggctatttgcagaagaaatgctaatgattatttagacacacaaagaaatgttgaagctcactagcaatcaatatatgtgaaaaaaacacaataatgaaatacaatttttgccctattaaattagcaaatacttgtaaaagtcaatgtggattattgatgaaggaaggtgtactacaatgctgggccctctcacactattagaaatttgtacaatatttctagaacacaagatggcagtaagtctcaagggcctttaaaatattcattctctttgtggtaataatttcacttccattctgagcaggtaaaaacaaggacaaacatatatgtacatgtcttttatttaaaataataagtagaaacaaattaaatacctgccaatatgggagagttaaataaattatagtatgtccacaagatgaaatattatattctgatttaaaattatgtccacagagaatttttaatgatttggaaaactgttcacagcatgttacagtgtggtctaaataggggagtaggattatgtgagaattttacttgttactttattctgtttcccaatcaccctcccaaatatctacaagtgtaatgacaattgtaataaaaaaaatactgtactccaaaactcctcatcagccacaattacattcatagaatagcagaaggtcctctcccattcccttatctcagggaaactccactccacctcccaggtcctaaactaaaatagtgacgtcttttcctcctctgaggttgcccagcaaagaaggtggatggtgactcacagtgtgggctttgtaggaggccacaagaccccaaaacctagcattcaagaaaaggaaaagcaattccccagactttggcattggtagaacctgcctggtttcctatctaagcccggccaagcatgaatgtggatcagtgaccttgggactatctctgcattgagcaggaacgtaggctccagaagggcaggttctgtcctgtccaccactgtgtctccgaggcctatcttatgatataggattcagcaaatattgaatgcatggatgcacaagtttcttcttctatgcagtggatgaaataagcctgtttcacagagtggtttgatgtttgtaaacagtcaggccacagtagatgctccgtagaggttggtacccatgccacacgtagctgaccacagcagaggcctcagtctcctcgctctcgtaaagttagacagcttcgctggaggtataaatggtttagccttgtctctgagttttctcagatggtctgagacacgtggctttttttcccttctggtttcctctgaatcgattccgccactggtgaagggcagtaaattaataactaaatttcccccccatgacaacaagcccaacaactaattggctcaatatctccctgttgctgtaacactttgggatttttctaggtgagatataaataagccaattctattaataagccatttggccaagggaagaaaatacacttgggagatcccaaggggcctggggaagccgctcagtggcccatggagtgaaagacttgattacaggaatgaagtattctgcctctgtgccctcctccctgcaaatctgtactccctgcagactcctctcaggcttggtgggggagggggaagtgaagctttgttaagtttaaaaattataatttagataaatctgtgcattcattggtgtgagcgtgtctctggaaaataatagttagcagggtagaacctgccgcatttcaggggctttattgtctccttataattaagtcctgcacagaaatccaattacaagtgttctcaatcaccctccagctaagtgctaacagagaggggaggaaggctcctggacttaaataactggataaaaattaatatcgtggccgtgttggctaattaaaagtgccgcctctattagcaggcctttatattaataaatgagactattattatcatatccgacaaccagggtctttatcaagtctgctctgtcagccccgcttttgaaagcacaagttcatggccccaggtctgggcttctgtgggagcagaggggacagctccatcctatccaacagttgactgaggtgggagcattagcgcccgccgtcttgtgtggtcctcacaccaaccctgtctagtgtgtgttacggttcctgcttcacagctgagtaaactaagcttagatgttgagtaacttctcctaataagaagcagagctcgaattcaaacctgcaacctcaggaccctgggtctagcattcattctattacagcagctcattagccttactatggatgggctgggtgggttggatgggtggcagatttttattatggaccagtacctagatggtggaaaacttcccttcagtagatcttcaacatcccttgtgggccaatcatgtatttactgatcccctcccatgggttaggcactgttctaggtgctggatacgatggccagcccgctttcaagaaggcaagcaggtatttacaacgacagagcaagtgtagggtgccgcagaaccacaccaaggaatatccaacctgggcttgggaaatagggaagatttctcaggggagatggcatctcatttgagtttggaagaacaaagagaagaaacccaggccaagaagtgagttgagggaaagagttccaggcaaggaaatcctgtgtgcaaaggcaccagagagagagcagctataagcagtttactgtgtctgaaatataaaattcaaagtgtgttgtgaaaaaattatacagctggagaggtaaaaagggccagatcacatgaggcaggaccttgcggctgtgctcacagcttaggcagcttaccccaggggtgactgagcatctttgagtggtttttggcagaatgatgtgaacagaagcactttttgtgttcatccctctggcaggagtgtagaggacggactggccagaggccaccctagaagccaacagccagttaggagtcatgcaagagagatgagagtgacagtggggatggggagatgtggccccttccagagacaggcaagagatagaaccgtccaaacggtgactgaccacaagtacagtgtgagggagaggtgggagccacgtctgaccccatttttctggcttgagcaaagcagagggattttagaaggtgggaaagagaggatgagggagtagttttgggtgaaaatagtaagttcaattttgacatgaagagctttcagtttcttaagaacattcaaggtcaggtgtccagtgagtggttagattcatgagtacagagctccagagaaataatggcctggagataatgctttggaaattatcaggtcacagatgatgactcaagtatgatcatagattaaatcatccaggaagggatggagtggccacacaggtcttaatctccgttcatcatttcagtccacaagcgccatgcatctcctgtatgcaaaccactcatctcttgtcaccaagcattttcgtctattagtataatatttccttagcgacaatagatgaagaatgtcacgtccaatttccaaccaaggctagacatcctccaacccacacagaaacatggaatttaatgtgagtcatcagtatctgttggcaatccagtgaacatgaattgaaaccttggcttgacctccaatttacttcaacgcctgacctatcatgaaaccaggagctctgagaaaaagtagccaagtactctttcagtttcacagaatatttaccctaagtcaccagagcctggtaatgaaatccagactcaatcattttaatgtctaaattccaaaaataatgataataatgaatgaaatgctgaatggacttaaagaatgaaagcttttaagtgaggcaggggtggaaggacgaggaaggaaagaaaaatatctgaaaacaacatcttgtttttacaaagtaatgggcccactatttgccatccatcagctaacaaatgcaggaaagtcctgattgataggcacactaagattggggtgaaagttacaatgtgatgaattttctcatgataaggagattgtttcagctttcactgaaaaccttgccagggcgtctggttaagctttcttgctctagtaagtcagcttattttctgatcctgcttctggtcagacctgggggaaggtgagaggcaagcctggccagagtggaattcagaaggtagttcctttttttttctttttctttttctttttttagagacaggatctgtctctgtcatccaggctggagtgcagtgttaagatcatagctcactgtaacctcaaacacctgggcccaagcgatcctcctgctttagcctcatagtagcaaggactacaggcacacgcaaccatgcctgtctgatttttaattttttttcgtagagacagggtctctctatgttgcccaggtgggtcttgaactcctaaactcaagcaatcctccagccttaaccaccccaggtgctgggattacaggtatgagctacagcgcctggtgtccgtaggtaatttcttacacaagattatgaagtgtgaagtcagaaggcagatccccaacattatgtctggggaggtaccaagttcaaagccacatgataaggccaagacctgaccagccattaaagccattagagaaggagcctaaaggaggctacgggagggatgggaacagtcaggaagctggaggaaaggacatagggacagtggtgaataggaaggagtctgaaagatccccagtgctcaagaattggcaacatctggggatattcattatccattgctacataacaaattaccccagacctgaaacaacccacattcactatcttgcagtttttgtggggaaactgggaatgtcttggctggatgccagtggctcaaagcctctcctgaggattgagtcaaggtggagatgggagctctgcctcctctaagcctctaaatggagagggaggatccacttttaagctcactcacgtgattgaggaaggcctcaattcctcatcccataggccttcccaaaggctgcctaagggtcctcaaacatgggagctggcgattggagaaagagggagaggaagaaacagtgagagagaaaccaggagagagcaagtgttccaggtggaagccacagtctttttataacctaatattggaagtgacatgtcatcaattctgtctcattccattcattaggagcaaatccataagttcagcccacaccaaaggggaagagattacacaagtgagtgaacaccaaggggcagagaatgctgagggcaaccctaaaggctgccagccacagtggggttacttttcaggtcccaaaggcaggactgagtgcatgggcatgccaggtctattaaaaacactatcaggccaggcatggtggctaacacctgtaatctcagcactttgggaggccaaggtgggtggatcacctgaggtgaggagttcaagaccagcctggccaacatggtgaaaccctgtctctactaaaaatacaaaaattagccgggtgtgctagtgcatacctgtaatcccagctacttgggaggctgaggcgggagaatctcttgaacctgggaggcagaggttgcagtgagcagagcctgcaccactacactccagcctgggcaacaagagcgaaactccatctcaaaacaaaacaaaaccaaaaaatggctatcacacgctggacagcagaatgtggcaccaaattcttctttggtggataagagtctcacagaatttctgggccatgtcggttattattttccatgacagcaggtgtcaagatagaaggtatagacagctagggtaaccatgtactgattctcagatattctctagcagttgactttttgagtaaatcactgatggaatcctgacatctgttcccctttccccactgatctttccttttaaaaaaattctaggtcaggcacggtggctcacacctgtaatcccagtactttgggaggccgaggtggtggatcacctgaggtcaagagttcgagaccagcctggccaacatggtgaaacctcatctctactaaaaatacaaaataatttagctgggcatggtggcaactgtctgtaatcccagctactcaggaggctgaggcagcagaatcacttgaacccgggaggcggaggttgcagtgagccaagatcatgccacttcactccagcctgggcaacagagcaagactccacctcaaaaaaacaaaaaacaaacaaacaaacaaaaaaacacaaacaaacttcactgttcttttctgtgctataaattagtctctcctataaaagacactaccttcaaattttctgcacaaagctcacagggctaccttgatggagaaatcttctgggaacagagttgcaactctgagagcacagtcagtcacattaggaaaatcgagttggtttctttactctttgaaaagaattttaagaatcagcaagtctaggagaacgtgggtgtgatgtatggtcatgatgaccacacaccaagtcaaatcttattctgggctgcccagcctgccctgtggagaagtctgactcagtcctctcatgatgccttggggagaccgtggggaagggggatcctgggaaggtccatgaaaggaacacattgggaccctggccacatatttccatactgggattaggacttttgggagattcccagtggagactctatgctataaatacatctgcctgtatggttaagaatagccagtgaccaggccaggtttatggagaggaaatagagaaagtgagaaaagagaaatggagggtagtagaagacagagaagggagaggaaaataaaccagatgaaagagcccccagcagccactgcaccctcagggcccatagcagccactgcaccctcagggcccacagcggccactgcgccctcagggcccacagcggccactgtgccttcagaacccagcagcactacgtccctcatgaatcaatgcattttaccacctttactgagttcctactatggcctaggcccagaagatacaatgatgaacaaaatagacatagttgctgttcaccatagtgagaataacagacatggaatcagtgtgataaagcttgcaagggagatggccggtcatcaggatgaaattgtagggctaaagagattgaggccaccccaccagcaaagcagggtctggcttgcagcccttctgcaaggggacataggtgggggaaaatgcaccttcctcacaccaaacctgagccctggctttgggccacagcccatgagtctcgtgtcaactgctgccctgctcacagatccacctctcccttagcctctcactgtgctgtccatctctcaggatttgggtgttttttatcttgtcattgcctcttcttccgtccattcagactctttggaaatgtcaaaggtacaataaaaatccaacagctggtgtttgccatgggtttggaaaagagcagtatcctctagtctggccgacagaaagaagaaggaactatatccaacagatctctacgtggaagacatagaggggcatttggcctaaaatagactgagacccagcgtctgctcccaacttacacatctcttaatggccctgtgccccattaaaccatgggggctgactctctgggctcgctacagggaagattctcaacaaaggaagaaaatggtagctggggagtctatagctccaaggtgggcactgacctcaagtctacccagagaaccctacctgtcttagattggtgagctccttcccagcctgcagtaaggccggctatcagctcctccccttccggcattccaaagttccggcatggaccatccagtcaactctcggtcctttcttccagtactcaacctactttcataagtgagagtgtcttcctgatgtctgccctagatccctcctcctgttatttttttcataattataagcaaagagctagagtcacacccaaatgtcacagattctggacactgcagcacattgtagccacgtgcctgagggcacccaccgatcacactggtcagcggagggtgaggcatctcaagtaggacagagggaagccagggtggggaggggtccccagaggccctggcaccccgatagtcgggggacatatcccagtggatatgtctcccacagccggagctccactgacaggccttgtgaatgcactcccagatgaaaaggatgagccccaccctgggggatgcccccagccccagtcctgtcagtggttaacccagagcccctctccagagacccggtgtcatgacttctctggctcctgcctacccacttccacccagagctttagcgtgcatgtggagtcatcttttaattttctgcttggctcggtagattgcagatgctctctccccagagctctgggcctatgcacagcttccatttgttatgtggctgtgatgctcccctctctccacttttccctgctcagcaagcaccaaactccaacctccccatcaaacaagcttccagacactcagagtctgtgtggtccctactcctctgccctcctaatcccaaggttccctccttaacccccaaccctgagactcagcaacgggacagctcctcaagccaaaaggggcggagagggagcaggaagggagagactgggaaatcaaagccgcggccctctccacatccgccaccgcaatcacagcaccctccaacccagagcggacaaagcccttgttggagccaatggctccaatgccagccagccccttagagcaatgacagccatgtgctacatttgcccaattctgcagctgggctgattaccgtggttcccaagcttagggtccagccccaaaccaaacaaattaggacaaaaaccacaggcttcttcattcccctcattcccagccagcaattgctgcaggacccctataattgataacaatgcaataaaaagcccaccacctgtcctttatctcgaggatttggcagcctggccgacagctaagcacatccttcagtggccacagccacatggaatttagcaccaccgcatctctaaatgccgcatcaccccagggacaacctgagacctgtcgtattcaaagacgtggcccagactggaagaagtaccacagctgaatgacgggataggcagcctaagagcggggaggacttggggctagaagtgcccaccgtgatgggccaacccatagagactggagctgacgctggtgctgaggactgtgcagccagcagatgcaggggtgtggtggagagaatggcaggagccagtggcccaggccctccagatgcatttgggaggaggccacaaggaacatcacagtggctgggaatcacctcccagcaggccatgttcagaaatgttgggaagcaggagttggtgtcaatgaagtctggccatctgtaggatcctgtagcactctggctctagcatcaaggttcaggaatagaaattaaaacaaagatccagtgatgtgtgaggtctgggtgcaagggaggacccaggtacctggaaggagaaagaggcaaggaaagaggtccagtcagggatagagaaccagatttcgagcccaggtgatgtggacctattctccagctggagtctaaattgagaggaagcaggtgctttggaagctctggccaggaaacagcaggcaccccactgccaatgctggacaatgggggagagagcaacagcccaaggtcacctcaggatgcaaggatcggtcaaatccaggtaaaggaaacagagaacactttggaactggatccaaagtgagggtcctaccatggccacaagagcagtttttcaggaaggtgccagaagggttcacttaaagcagtggtaccaggaccagcagcatcgcatcccaataatgtgttagaaatgcagatgatcaagcctcactccagtccgcctgaatcaaaaactcaggatggggcccagcaatctgtgttttatcagcattctaggcaagtctgactctaaagcttaaaaacaaagtgccagttctcaagggaggcattcttttattcaagcagttactctacctgaagagtttgctaaaacccagattgctggatctcagcccaatccctgattcaggaggcctgggaagattgggggtgagactgataatttgtatttgtgacaagttcccaggtgaagctgctgttgctggtccaaagaccacacttggacatccaccgatttaaatatctggacacaagatataatcctcaggctgaaagatggctagtctcaaaccaaatttctgggcccagagggcaagaggaaggctgaggaggaacaattccagtgaggcagttgtcttagtctcttcgggctgctatcacaaaatagcatagactggcggcttaacaacagaatttattcctcagagttctggaggctgggaagtccaagagcaacatgtcagcagttgtgctgcatgatgagggccacttcctattctactgtaacctcacatagcagaagggatgagggagctcctctggtctcttttataaggacactaatcccattcatgaaggctctgccctcatgacctaatcacctcccaaagacctctgtctcctatcatattcatcaacataagaatttggggggagggggggatgcaaacatttgatctatagaagtgatgttatggactaaaagttcgtgtcctcccaaatgtaatgtattaagagacacgacctgtgaggaagtaataaaagttaaattaggtcataggatgtggccctaatccaaaagggctggtgcctttataagaagacaccagagctctctctttgccacctgaggacacagcaggaaggcagctgtctgccagccaagaagagagccctcaccaggaaccaaaccggttggcagcttgacctcggacttcccagccttcagaactgtgagaaataaatttgtgttgtttaagccacacagtctgaagtattttgttgtagcagcctatgcaaactaagacagcagactcagggaccaaacaacctgatttaatagtgaaattaaaataatagtaataatagaaaggtcttcatgtttaccccccaaggtggcaacacagatgactcccttctggcccccagctctttcagacccaccttcaccttataactgatccttctttgttttcatgcccagacaatcctaacaagggtgccttgaaaatttctttctgatccctgctcctctctcaagttactgcctgagcctttaagcagcactctctccctctgcatccatctcctctcacctctgccctcagccctggcctggattaatcatccaaaaccatagttaggagaagcagggattgggcagatgaggagaggactggcccagccagtgagtccctgcagagatagcagccacaggtcagggaggctcaaagatttattggctactaaactaggccagagagggtgggctaagaaggcagcacataatcaaagtgatactttatgttgctccatctcaggaaaataattgttccactggaacatcattacactatcatttttctattcctgtgccactttcagggcaatagaaactcactttcttcttcatagtaagctgcaatttcaataactcaaaaggccttttctgagatggagccattctcctacccccacctcatcctctgatgatgtaggggaggacaggtgcctcttccagactctaggctgggagaaaggcctcactggttcctgagcacagctgtcccttcttagtgttcttcctgcctgtcactcaggtgaccaactgtcctagttgtgtcccaggaggctgaactttcagtgctaaaaccaggctaatacaaggaaaaccaggacagtttgtcaccctactgccaccagctggggacaagggagcagcccatcattcatgcatttaacaaggatttgttaaatacctacaatgttccaggcacttttcaggtgctaggaagtagcaggttacaaagcaggccaaaacgttgcctgagctaggtgtggtagctcatgccttgtaatcccagtgctttcggaggcagaggtgggaggatcacttgaggttgagagtttgagatcagcctggacaacatagtgagaccccagtctacaaaaaaaatttagaaaattagccaggcacggtggcttgcacctgtagttccagctgcttgaagtgggaagatcacttgagcccaggaggtccaggccacagtgagctatgatcataccactgcactgcagcccaggtgatagagtgagatcctgtctcaaaaaacaaaaaacaaaaaaaaaaggagaagaagaagaagcaaaaaaacaagtttgccctcagagaccttacattctagtggatggagcaagcaatacacatgatacataagcgcattgtatgatgtactagaaaatgacaagtgctgtgaagaaacatgaaagggcaaggaaggttggtaatgaagggcaggggatgcaattttaaatagggtggtcagggtaggcctcactaagaaggtggcatttgagcagaagtttgagggaggagaaggaagaagtcctgagatacctgggggaagggcattccaggcagagtgctctgccagtgccgaggttcagaggcagagcttgacttgcatattcaaagagccccgcagggaggtctgtggggctggaacacagtgagcaaagaacaagcaaaggggagaaaagcaccaaagtagtcagagaggtcaagttatgtaggggctctgtagacccttgtagggtccttcgatgttttttacctggaatgagatggaggcagggacatgattcaatttatgtcctaacagagtcactgtggctgctgtgttcagaatagatgacgtggggagagagggagagcacagaggctggaagagcagccaggaggctatagcaagggcacaaataggcaaggatggtcccataggccaagatggtcacagtgtagggagtgacgaaagctggattctggtagagctgacaggctttcctgatggggcttgggtaaaaggcgtgagaaaaataagaagaatcagcatggcttccagtacttgaagccagagaggcgagtattaaatcctcagaataaattatatccatttctaagacccatactaccccaaaggacgtgcacttgagatattcctggatttaagttagagactaagatgcacttcaaataggatcgttaaaactctggagtgtggcctttacatgcagaatagattttcattcattcctgggcctggagtgggtggataacatggccacacaggtcagctctttagcctggtgactccagatagcccattagttaagaaggtcggacctgctcttaaactctctggaactcagttttccagtgattggtgtgagaattaaacaggatcatcctcataaaacacttagcacagagccgaaaacttagaaagcgcctcattcctggtggagttaacacccactgatgatactcttagaacgcatggtgttgaagctgacagtgaccagcagagggcaccatcagtagaagacggtggagctgcactgctggggagactggcttggctccaactagcttcgcacaaatgagggattgggattcacagttttcctctctcctctttctcctcactcctttttgctgaattttaaatttcctctggattctccccctcattggagagatctcctgctgtgcaaaatgggtcttctggtttgaggtctcccctgctcaaaacagccccaaagccctggcattaggggaaaataacgtaaccatctccagcatcagtcagctcttacctctgccccaaagccctgcaagatacccagagactggatgactcttccagtaccctgggcatgggaggatggagacaagcgaagataaggtttgtccaatttgttctggtcccaggaaattctgcttcttatctcctctcccattgcctcatcacattgccaaaattacctcgataatataattcttaatttaagaattcattttcacttcaagaaagaggaactctgcagccagataagaaactccatctgtcttcaagaaaaagggtcgtggatttgggtgtcacgaatcctgtaatatcttaaattaaggtgccacttctgaatgctttcttcatatttatcaaatgattattctacagaggtgaatttaatattgttaaaataatgatcatgcatgtttaatacatcaatttaagttattatctcccatgctataaaatgcaggataatttcataaataattataaagcatttacaaatggcgacttaatgcaaagcgttcttgctaatcctttatctttcacaaacacagaaataacaattagattcatggaatgaaaaagggaggttatgttctacaatgtgtcacctcctcactgaatgcaaataagaaggccaaaaaaaagaaaaaaagaaagaaagaaagacagacctggattgaaacagtgcttctttcctctttcttgatagatggaagatgcctgtccacagtgtcattattccaggctcagggaccctttctctgcagagactggggatggggcattgactcagataagaagaattctttgaacctcttttgaggaagcctatttctgctttctgctgttgcctttggggaaatagagaagtgcagtacagaggcctggccatgtggttagactaagaagcacttttctccatgcacctgacattctcacaacacatacataggcaaaggatggacaggataaccctagattcctgccagtatgatccagaccttcaacccttccagaggatgaatggagttaaaagtcactaggagtcaaaaaagatttttttttaaaaaagcaccatacatattcattcttcagtctgcctgtgaataacacagaattagaaagacaagggatgccctcaaagagcttacaccctagatggggagtctgaatattcacgttcgaaacaattcggtactacttacaggacaggatagaactgcagttaaattagctctattaaaattaggttgatgttaagttaatcaaggaaggcttcttggaagacgtaaattggagccaggtcagatcaatgaaatcaaataaatcaaagataggctgaagatactgagacaatacatggttcccttcacacacacacacacacacacacacacacacacaaacatacatacgtacatatatgcggggagcacctgccgtgcacctaaagcaactagtgattccagcaaaaggggttcctaaccagctcatgggtcatcttgctgctgatccaagcctagctctgcaaaaacaaacagcttcctaatttcagcgactgtgtttaaagctgagatatggaaaaacaaaataggagaggaaaaaccttaaaggttccaacgctggtctatcagcttcctgtcacagtctattgccactattcacacaccagcaggtccaaagtgaatcccagctgttgactgatgcttcaaatctggggaagagatgcggcagggggagctgatcaagaatagaccatcaatcagaggaccagcaagttgggttgtatgaagctgcagccctaaagaggaagctgcttacagttcctgagtgggcaggggggcaggctcccactacaggtcagaggtaaggccctcaaagaagccacagggcatctccttcaaccctgtcagtcccacagcaaagcagggaaagtcatgggacaaggcagcctgaatccttatagctgaccaagttcctgatccctcccctgcaaaagatggccacgaattcatcactagaaaccaatgctaatcgcaccttactcctcccctacctgcacccccacctgttccaccagctccatagcttcctctcttcacggacttgccaggttctcaacactcggttctagtcccagctctgggaacaagttgctaggtgatacgccataggcaaaaaaagttaacttctctggctctcacatatgtctctcatcctgtgtctctccctccctcctaaatatgtcctctgtcctgtagtcacagcaaaatcaacttacctcataatgaacccatgaaaacaggatatttacatagcctcaaagcatctcctctcaaaatagatatcaactacttggggattttaacatatctccataaattctttactacgctttcctccaggagtgggagtttaatttccatccccttgagtatgggatggacttagtgactggcgtctaaacaaacagaagaaggaaaaggaaaatagtaacttttcagtggagaatccagacatggtaaagtatgcaactttcctttctttttttttttttaattatactttaagttctgggatacatgtgcagaacgtgcaggtttgttacataggtatacatgtgccatggtggtttgctccacctgtcaacccgtcatctaggttttaagccctgcatgcattaggtatttgtcctaatgctctcccttccctttgcccccaccccccaacaggccccagtgtatgatgttcccctccctgtgtccatgtgttctcagtgttcaactcccacttatgagttagaacatgcggtgtttggttttctgttcttgtgttagttttctgagaacaatggcttccagcttcgtccacgtccctgcaaaggacatgatctcattcttttttatggctgaaatatgcagcttttctaaagcaagaaatcttttctagtttatctagataataaagtacatcttaggcaggaatgctagattattctggaaaattaggctgaatctatcccaagagagaaccttgcagagctggcttctgcagtcatgtcatgtggatgtcatgtgtctcctgatatgatagaatgagaagggcacttcacctctgtcatattcttcctaaaaactcatcacctcactcagatcataagaagacaacggacaagcccaaactagggacagtctacaaactatctgattggtgttcctctgaactgtcaagatcatgaaaaacaagggaaggttgagaactgtcataaaccagaggagatgaaggatgactaaatgtaacatggtatcctgaattggatcctggaacaggaaaaaaacattagtgagagtactagagaaattagcagaaagtctagagtttacataatggtattgtaccaatgttaatttcttcattttgataaatatatcatggttctgcaagatagaaaccttaggggaagctggatgaagggtgcattgtaagactgtctttgcaactttctgtaaatctaacattatttcaaaataaatttttgatttttaaaaagaacttattgttttgcttcctcctcatcaaaataaaaaatgaaaaaaaccctccccaccctaaaattattgttgatgctggtttatttcacaaagtcagcacttggagttatttccctttccccaacacagcaggctccccctgtcctctggagctgagctcctcctggccctcctagctgtgggcctccctcttagctgccttcctgttgaccccactatgccgccttttgaggccagccccaggctcacctcagtggctctctcacagtccgcactccctccgatggctctctgggcatttgttgtccacactacttattaggatctcaataaccagagagtatttttgcaggattaacccccaccttggaaacatccaccacacaccctgcatgctgcttgccccaccaacccctcaaatgttgctcacccccagccctgggctaaaacagagcaacagtgcctcctggtgaccaatgtggaaatctgtctaactcagcgtctcctccacattccctaagctcccttcagagcctgggcttccagacctctgtcccacactccttctcagcaatcacccctcatggctcagttaatttcaccctggacaatctcattcccacataaatatacatccttgtccgtgctggttttctcccccctctctctcctgtccaaacagcccaccatttctttattatttttgttacatgtgtgaacaaactaacacccttacctgagaccaataagagctggcctccttctatagcaaaaggggagcgggaggagcagccatgagttctgagcagaacttagatc

SEQ ID NO: 87 - DNA, 3044 bp, Homo sapiens
  Genbank Accession No. X51521
  unsure (1)..(3044): n = a or c or g or t
aggcagggcgggcgggcgctctaagggttctgctctgactccaggttgggacagcgtcttcgctgctgctggatagtcgtgttttcggggatcgaggatactcaccagaaaccgaaaatgccgaaaccaatcaatgtccgagttaccaccatggatgcagagctggagtttgcaatccagccaaatacaactggaaaacagctttttgatcaggtggtaaagactatcggcctccgggaagtgtggtactttggcctccactatgtggataataaaggatttcctacctggctgaagctggataagaaggtgtctgcccaggaggtcaggaaggagaatcccctccagttcaagttccgggccaagttctaccctgaagatgtggctgaggagctcatccaggacatcacccagaaacttttcttcctccaagtgaaggaaggaatccttagcgatgagatctactgcccccctgagactgccgtgctcttggggtcctacgctgtgcaggccaagtttggggactacaacaaagaagtgcacaagtctgggtacctcagctctgagcggctgatccctcaaagagtgatggaccagcacaaacttaccagggaccagtgggaggaccggatccaggtgtggcatgcggaacaccgtgggatgctcaaagataatgctatgttggaatacctgaagattgctcaggacctggaaatgtatggaatcaactatttcgagataaaaaacaagaaaggaacagacctttggcttggagttgatgcccttggactgaatatttatgagaaagatgataagttaaccccaaagattggctttccttggagtgaaatcaggaacatctctttcaatgacaaaaagtttgtcattaaacccatcgacaagaaggcacctgactttgtgttttatgccccacgtctgagaatcaacaagcggatcctgcagctctgcatgggcaaccatgagttgtatatgcgccgcaggaagcctgacaccatcgaggtgcagcagatgaaggcccaggcccgggaggagaagcatcagaagcagctggagcggcaacagctggaaacagagaagaaaaggagagaaaccgtggagagagagaaagagcagatgatgcgcgagaaggaggagttgatgctgcggctgcaggactatgaggagaagacaaagaaggcagagagagagctctcggagcagattcagagggccctgcagctggaggaggagaggaagcgggcacaggaggaggccgagcgcctagaggctgaccgtatggctgcactgcgggctaaggaggagctggagagacaggcggtggatcagataaagagccaggagcagctggctgcggagcttgcagaatacacagccaagattgccctcctggaagaggcgcggaggcgcaaggaggatgaagttgaagagtggcagcacagggccaaagaagcccaggatgacctggtgaagaccaaggaggagctgcacctggtgatgacagcacccccgcccccaccaccccccgtgtacgagccggtgagctaccatgtccaggagagcttgcaggatgagggcgcagagcccacgggctacagcgcggagctgtctagtgagggcatccgggatgaccgcaatgaggagaagcgcatcactgaggcagagaagaacgagcgtgtgcagcggcagctcgtgacgctgagcagcgagctgtcccaggcccgagatgagaataagaggacccacaatgacatcatccacaacgagaacatgaggcaaggccgggacaagtacaagacgctgcggcagatccggcagggcaacaccaagcagcgcatcgacgagttcgaggccctgtaacagccaggccaggaccaagggcagaggggtgctcatagcgggcgctgccagccccgccacgcttgtctttagtgctccaagtctaggaactccctcagatcccagttcctttagaaagcagttacccaacagaaacattctgggctgggaaccagggaggcgccctggtttgttttccccagttgtaatagtgccaagcaggcctgattctcgcgattattctcgaatcacctcctgtgttgtgctgggagcaggactgattgaattacggaaaatgcctgtaaagtctgagtaagaaacttcatgctggcctgtgtgatacaagagtcagcatcattaaaggaaacgtggcaggacttccatctgtgccatacttgttctgtattcgaaatgagctcaaattgatttttttaatttctatgaaggatccatctttgtatatttacatgcttagaggggtgaaaattattttggaaattgagtctgaagcactctcgcacacacagtgattccctcctcccgtcactccacgcagctggcagagagcacagtgatcaccagcgtgagtggtggaggaggacacttggatatttttttagttcttttttttttggcttaacagttttagaatacattgtacttatacaccttattaatgatcagctatatactatttatatacaagtgataatacagatttgtaacattagttttaaaaagggaaagttttgttctgtatattttgttaccttttacagaataaaagaattacatatgaaaaaccctctaaaccatggcacttgatgtgatgtggcaggagggnagtggtggagctggacctgcctgctgcagctgcagtcacgtgtaaacaggattattattagtgttttatgcatgtaatggactatgcacacttttaattttgtcagattcacacatgccactatgagctttcagactccagctgtgaagagactctgtctgcttgtgtttgtttgcagtctctctctgccatggccttggcaggctgctggaaggcagcttgtggaggccgttggttccgcccactcattccttctcgtgcactgctttctccttcacagctaagatgccatgtgcaggtggattccatgccgcagacatgaaataaaagctttgcaaaggca

SEQ ID NO: 88 - DNA, 2930 bp, Homo sapiens
  Genbank Accession No. J05021
ggggttgggacagcgtcttcgctgctgctggatagtcgtgttttcggggatcgaggatactcaccagaaaccgaaaatgccgaaaccaatcaatgtccgagttaccaccatggatgcagagctggagtttgcaatccagccaaatacaactggaaaacagctttttgatcaggtggtaaagactatcggcctccgggaagtgtggtactttggcctccactatgtggataataaaggatttcctacctggctgaagctggataagaaggtgtctgcccaggaggtcaggaaggagaatcccctccagttcaagttccgggccaagttctaccctgaagatgtggctgaggagctcatccaggacatcacccagaaacttttcttcctccaagtgaaggaaggaatccttagcgatgagatctactgcccccctgagactgccgtgctcttggggtcctacgctgtgcaggccaagtttggggactacaacaaagaagtgcacaagtctgggtacctcagctctgagcggctgatccctcaaagagtgatggaccagcacaaacttaccagggaccagtgggaggaccggatccaggtgtggcatgcggaacaccgtgggatgctcaaagataatgctatgttggaatacctgaagattgctcaggacctggaaatgtatggaatcaactatttcgagataaaaaacaagaaaggaacagacctttggcttggagttgatgcccttggactgaatatttatgagaaagatgataagttaaccccaaagattggctttccttggagtgaaatcaggaacatctctttcaatgacaaaaagtttgtcattaaacccatcgacaagaaggcacctgactttgtgttttatgccccacgtctgagaatcaacaagcggatcctgcagctctgcatgggcaaccatgagttgtatatgcgccgcaggaagcctgacaccatcgaggtgcagcagatgaaggcccaggcccgggaggagaagcatcagaagcagctggagcggcaacagctggaaacagagaagaaaaggagagaaaccgtggagagagagaaagagcagatgatgcgcgagaaggaggagttgatgctgcggctgcaggactatgaggagaagacaaagaaggcagagagagagctctcggagcagattcagagggccctgcagctggaggaggagaggaagcgggcacaggaggaggccgagcgcctagaggctgaccgtatggctgcactgcgggctaaggaggagctggagagacaggcggtggatcagataaagagccaggagcagctggctgcggagcttgcagaatacactgccaagattgccctcctggaagaggcgcggaggcgcaaggaggatgaagttgaagagtggcagcacagggccaaagaagcccaggatgacctggtgaagaccaaggaggagctgcacctggtgatgacagcacccccgcccccaccaccccccgtgtacgagccggtgagctaccatgtccaggagagcttgcaggatgagggcgcagagcccacgggctacagcgcggagctgtctagtgagggcatccgggatgaccgcaatgaggagaagcgcatcactgaggcagagaagaacgagcgtgtgcagcggcagctcgtgacgctgagcagcgagctgtcccaggcccgagatgagaataagaggacccacaatgacatcatccacaacgagaacatgaggcaaggccgggacaagtacaagacgctgcggcagatccggcagggcaacaccaagcagcgcatcgacgagttcgaggccctgtaacagccaggccaggaccaagggcagaggggtgctcatagcgggcgctgccagccccgccacgcttgtctttagtgctccaagtctaggaactccctcagatcccagttcccttagaaagcagttacccaacagaaacattctgggctgggaaccagggaggcgccctggtttgttttccccagttgtaatagtgccaagcaggcctgattctcgcgattattctcgaatcacctcctgtgttgtgctgggagcaggactgattgaattacggaaaatgcctgtaaagtctgagtaagaaacttcatgctggcctgtgtgatacaagagtcagcatcattaaaggaaacgtggcaggacttccatctgtgccatacttgttctgtattcgaaatgagctcaaattgattttttaatttctatgaaggatccatctttgtatatttacatgcttagaggggtgaaaattattttggaaattgagtctgaagcactctcgcacacacagtgattccctcctcccgtcactccacgcagctggcagagagcacagtgatcaccagcgtgagtggtggaggaggacacttggatttttttttttgtttttttttttttgcttaacagttttagaatacattgtacttatacaccttattaatgatcagctatatactatttatatacaagtgataatacagatttgtaacattagttttaaaaagggaaagttttgttctgtatattttgttaccttttacagaataaaagaattacatatgaaaaaccctctaaaccatggcacttgatgtgatgtggcaggagggcagtggtggagctggacctgcctgctgcagtcacgtgtaaacaggattattattagtgttttatgcatgtaatggactatgcacacttttaattttgtcagattcacacatgccactatgagctttcagactccagctgtgaagagactctgtttgcttgtgtttgtttgtttgcagtctctctctgccatggccttggcaggctgctggaaggcagcttgtggaggccgttggttccgcccactcattccttctcgtgcactgctttctcc

SEQ ID NO: 89 - DNA, 3072 bp, Homo sapiens
  Genbank Accession No. AL162086
cggacgcgtgggcggacgcgtgggggcggcggggagcacacggagcactgcaggcgccgggttgggacagcgtcttcgctgctgctggatagtcgtgttttcggggatcgaggatactcaccagaaaccgaaaatgccgaaaccaatcaatgtccgagttaccaccatggatgcagagctggagtttgcaatccagccaaatacaactggaaaacagctttttgatcaggtggtaaagactatcggcctccgggaagtgtggtactttggcctccactatgtggataataaaggatttcctacctggctgaagctggataagaaggtgtctgcccaggaggtcaggaaggagaatcccctccagttcaagttccgggccaagttctaccctgaagatgtggctgaggagctcatccaggacatcacccagaaacttttcttcctccaagtgaaggaaggaatccttagcgatgagatctactgcccccctgagactgccgtgctcttggggtcctacgctgtgcaggccaagtttggggactacaacaaagaagtgcacaagtctgggtacctcagctctgagcggctgatccctcaaagagtgatggaccagcacaaacttaccagggaccagtgggaggaccggatccaggtgtggcatgcggaacaccgtgggatgctcaaagataatgctatgttggaatacctgaagattgctcaggacctggaaatgtatggaatcaactatttcgagataaaaaacaagaaaggaacagacctttggcttggagttgatgcccttggactgaatatttatgagaaagatgataagttaaccccaaagattggctttccttggagtgaaatcaggaacatctctttcaatgacaaaaagtttgtcattaaacccatcgacaagaaggcacctgactttgtgttttatgccccacgtctgagaatcaacaagcggatcctgcagctctgcatgggcaaccatgagttgtatatgcgccgcaggaagcctgacaccatcgaggtgcagcagatgaaggcccaggcccgggaggagaagcatcagaagcagctggagcggcaacagctggaaacagagaagaaaaggagagaaaccgtggagagagagaaagagcagatgatgcgcgagaaggaggagttgatgctgcggctgcaggactatgaggagaagacaaagaaggcagagagagagctctcggagcagattcagagggccctgcagctggaggaggagaggaagcgggcacaggaggaggccgagcgcctagaggctgaccgtatggctgcactgcgggctaaggaggagctggagagacaggcggtggatcagataaagagccaggagcagctggctgcggagcttgcagaatacacagccaagattgccctcctggaagaggcgcggaggcgcaaggaggatgaagttgaagagtggcagcacagggccaaagaagcccaggatgacctggtgaagaccaaggaggagctgcacctggtgatgacagcacccccgcccccaccaccccccgtgtacgagccggtgagctaccatgtccaggagagcttgcaggatgagggcgcagagcccacgggctacagcgcggagctgtctagtgagggcatccgggatgaccgcaatgaggagaagcgcatcactgaggcagagaagaacgagcgtgtgcagcggcagctgctgacgctgagcagcgagctgtcccaggcccgagatgagaataagaggacccacaatgacatcatccacaacgagaacatgaggcaaggtcgggacaagtacaagacgctgcggcagatccggcagggcaacaccaagcagcgcatcgacgagttcgaggccctgtaacagccaggccaggaccaagggcagaggggtgctcatagcgggcgctgccagccccgccacgcttgtctttagtgctccaagtctaggaactccctcagatcccagttcctttagaaagcagttacccaacagaaacattctgggctgggaaccagggaggcgccctggtttgttttccccagttgtaatagtgccaagcaggcctgattctcgcgattattctcgaatcacctcctgtgttgtgctgggagcaggactgattgaattacggaaaatgcctgtaaagtctgagtaagaaacttcatgctggcctgtgtgatacaagagtcagcatcattaaaggaaacgtggcaggacttccatctgtgccatacttgttctgtattcgaaatgagctcaaattgattttttaatttctatgaaggatccatctttgtatatttacatgcttagaggggtgaaaattattttggaaattgagtctgaagcactctcgcacacacagtgattccctcctcccgtcactccacgcagctggcagagagcacagtgatcaccagcgtgagtggtggaggaggacacttggatatttttttagttttttttttttggcttaacagttttagaatacattgtacttatacaccttattaatgatcagctatatactatttatatacaagtgataatacagatttgtaacattagttttaaaaagggaaagttttgttctgtatattttgttaccttttacagaataaaagaattacatatgaaaaaccctctaaaccatggcacttgatgtgatgtggcaggagggcagtggtggagctggacctgcctgctgcagtcacgtgtaaacaggattattattagtgttttatgcatgtaatggactatgcacacttttaattttgtcagattcacacatgccactatgagctttcagactccagctgtgaagagactctgtttgcttgtgtttgtttgcagtctctctctgccatggccttggcaggctgctggaaggcagcttgtggaggccgttggttccgcccactcattccttctcgtgcactgctttctccttcacagctaagatgccatgtgcaggtggattccatgccgcagacatgaaataaaagctttgcaaaggcaaagaaaaaaaaaaaaaaaaa

SEQ ID NO: 90 - DNA, 3432 bp, Homo sapiens
  Genbank Accession No. U89942
actccagcgcgcggctacctacgcttggtgcttgctttctccagccatcggagaccagagccgccccctctgctcgagaaaggggctcagcggcggcggaagcggagggggaccaccgtggagagcgcggtcccagcccggccactgcggatccctgaaaccaaaaagctcctgctgcttctgtaccccgcctgtccctcccagctgcgcagggccccttcgtgggatcatcagcccgaagacagggatggagaggcctctgtgctcccacctctgcagctgcctggctatgctggccctcctgtcccccctgagcctggcacagtatgacagctggccccattaccccgagtacttccagcaaccggctcctgagtatcaccagccccaggcccccgccaacgtggccaagattcagctgcgcctggctgggcagaagaggaagcacagcgagggccgggtggaggtgtactatgatggccagtggggcaccgtgtgcgatgacgacttctccatccacgctgcccacgtcgtctgccgggagctgggctatgtggaggccaagtcctggactgccagctcctcctacggcaagggagaagggcccatctggttagacaatctccactgtactggcaacgaggcgacccttgcagcatgcacctccaatggctggggcgtcactgactgcaagcacacggaggatgtcggtgtggtgtgcagcgacaaaaggattcctgggttcaaatttgacaattcgttgatcaaccagatagagaacctgaatatccaggtggaggacattcggattcgagccatcctctcaacctaccgcaagcgcaccccagtgatggagggctacgtggaggtgaaggagggcaagacctggaagcagatctgtgacaagcactggacggccaagaattcccgcgtggtctgcggcatgtttggcttccctggggagaggacatacaataccaaagtgtacaaaatgtttgcctcacggaggaagcagcgctactggccattctccatggactgcaccggcacagaggcccacatctccagctgcaagctgggcccccaggtgtcactggaccccatgaagaatgtcacctgcgagaatgggctgccggccgtggtgagttgtgtgcctgggcaggtcttcagccctgacggaccctcgagattccggaaagcatacaagccagagcaacccctggtgcgactgagaggcggtgcctacatcggggagggccgcgtggaggtgctcaaaaatggagaatgggggaccgtctgcgacgacaagtgggacctggtgtcggccagtgtggtctgcagagagctgggctttgggagtgccaaagaggcagtcactggctcccgactggggcaagggatcggacccatccacctcaacgagatccagtgcacaggcaatgagaagtccattatagactgcaagttcaatgccgagtctcagggctgcaaccacgaggaggatgctggtgtgagatgcaacacccctgccatgggcttgcagaagaagctgcgcctgaacggcggccgcaatccctacgagggccgagtggaggtgctggtggagagaaacgggtcccttgtgtgggggatggtgtgtggccaaaactggggcatcgtggaggccatggtggtctgccgccagctgggcctgggattcgccagcaacgccttccaggagacctggtattggcacggagatgtcaacagcaacaaagtggtcatgagtggagtgaagtgctcgggaacggagctgtccctggcgcactgccgccacgacggggaggacgtggcctgcccccagggcggagtgcagtacggggccggagttgcctgctcagaaaccgcccctgacctggtcctcaatgcggagatggtgcagcagaccacctacctggaggaccggcccatgttcatgctgcagtgtgccatggaggagaactgcctctcggcctcagccgcgcagaccgaccccaccacgggctaccgccggctcctgcgcttctcctcccagatccacaacaatggccagtccgacttccggcccaagaacggccgccacgcgtggatctggcacgactgtcacaggcactaccacagcatggaggtgttcacccactatgacctgctgaacctcaatggcaccaaggtggcagagggccacaaggccagcttctgcttggaggacacagaatgtgaaggagacatccagaagaattacgagtgtgccaacttcggcgatcagggcatcaccatgggctgctgggacatgtaccgccatgacatcgactgccagtgggttgacatcactgacgtgccccctggagactacctgttccaggttgttattaaccccaacttcgaggttgcagaatccgattactccaacaacatcatgaaatgcaggagccgctatgacggccaccgcatctggatgtacaactgccacataggtggttccttcagcgaagagacggaaaaaaagtttgagcacttcagcgggctcttaaacaaccagctgtccccgcagtaaagaagcctgcgtggtcaactcctgtcttcaggccacaccacatcttccatgggacttccccccaacaactgagtctgaacgaatgccacgtgccctcacccagcccggcccccaccctgtccagacccctacagctgtgtctaagctcaggaggaaagggaccctcccatcattcatggggggctgctacctgacccttggggcctgagaaggccttgggggggtggggtttgtccacagagctgctggagcagcaccaagagccagtcttgaccgggatgaggcccacagacaggttgtcatcagcttgtcccattcaagccaccgagctcaccacagacacagtggagccgcgctcttctccagtgacacgtggacaaatgcgggctcatcagcccccccagagagggtcaggccgaaccccatttctcctcctcttaggtcattttcagcaaacttgaatatctagacctctcttccaatgaaaccctccagtctattatagtcacatagataatggtgccacgtgttttctgatttggtgagctcagacttggtgcttccctctccacaacccccaccccttgtttttcaagatactattattatattttcacagacttttgaagcacaaatttattggcatttaatattggacatctgggcccttggaagtacaaatctaaggaaaaaccaacccactgtgtaagtgactcatcttcctgttgttccaattctgtgggtttttgattcaacggtgctataaccagggtcctgggtgacagggcgctcactgagcaccatgtgtcatcacagacacttacacatacttgaaacttggaataaaagaaagatttatg

SEQ ID NO: 91 - DNA, 3198 bp, Homo sapiens
  Genbank Accession No. AF117949
aacctgaatatccaggtggaggacattcggattcgagccatcctctcaacctaccgcaagcgcaccccagtgatggagggctacgtggaggtgaaggagggcaagacctggaagcagatctgtgacaagcactggacggccaagaattcccgcgtggtctgcggcatgtttggcttccctggggagaggacatacaataccaaagtgtacaaaatgtttgcctcacggaggaagcagcgctactggccattctccatggactgcaccggcacagaggcccacatctccagctgcaagctgggcccccaggtgtcactggaccccatgaagaatgtcacctgcgagaatgggcagccggccgtggtgagttgtgtgcctgggcaggtcttcagccctgacggaccctcgagattccggaaagcatacaagccagagcaacccctggtgcgactgagaggcggtgcctacatcggggagggccgcgtggaggtgctcaaaaatggagagtgggggaccgtctgcgacgacaagtgggacctggtgtcggccagtgtggtctgcagagagctgggctttgggagtgccaaagaggcagtcactggctcccgactggggcaagggatcggacccatccacctcaacgagatccagtgcacaggcaatgagaagtccattatagactgcaagttcaatgccgagtctcagggctgcaaccacgaggaggatgctggtgtgagatgcaacacccctgccatgggcttgcagaagaagctgcgcctgaacggcggccgcaatccctacgagggccgagtggaggtgctggtggagagaaacgggtcccttgtgtgggggatggtgtgtggccaaaactggggcatcgtggaggccatggtggtctgccgccagctgggcctgggattcgccagcaacgccttccaggagacctggtattggcacggagatgtcaacagcaacaaagtggtcatgagtggagtgaagtgctcgggaacggagctgtccctggcgcactgccgccacgacggggaggacgtggcctgcccccagggcggagtgcagtacggggccggagttgcctgctcagaaaccgcccctgacctggtcctcaatgcggagatggtgcagcagaccacctacctggaggaccggcccatgttcatgctgcagtgtgccatggaggagaactgcctctcggcctcagccgcgcagaccgaccccaccacgggctaccgccggctcctgcgcttctcctcccagatccacaacaatggccagtccgacttccggcccaagaacggccgccacgcgtggatctggcacgactgtcacaggcactaccacagcatggaggtgttcacccactatgacctgctgaacctcaatggcaccaaggtggcagagggccaaaaggccagcttctgcttggaggacacagaatgtgaaggagacatccagaagaattacgagtgtgccaacttcggcgatcagggcatcaccatgggctgctgggacatgtaccgccatgacatcgactgccagtgggttgacatcactgacgtgccccctggagactacctgttccaggttgttattaaccccaacttcgaggttgcagaatccgattactccaacaacatcatgaaatgcaggagccgctatgacggccaccgcatctggatgtacaactcccacataggtggttccttcagcgaagagacggaaaaaaagtttgagcacttcagcgggctcttaaacaaccagctgtccccgccagtaaagaagcctgcgtggtcaactcctgtcttcaggccacaccacatcttccatgggacttctccccaacaactgagtctgaacgaatgccacgtgccctcacccagcccggcccccaccctgtccagacccctacagctgtgtctaagctcaggaggaaagggaccctcccatcattcatggggggctgctacctgacccttggggcctgagaaggccttgcgggggtggggtttgtccacagagctgctggagcagcaccaagagccagtcttgaccgggatgaggcccacagacaggttgtcatcagcttgtcccattcaagccaccgagctcaccacagacacagtggagccgcgctcttctccagtgacacgtggacaaatgcgggctcatcagcccccccagagagggtcaggccgaaccccatttctcctcctcttacctcattttcagcaaacttgaatatctagacctctcttccaatgaaaccctccagtctattatagtcacatagataatggtgccacgtgttttctgatttggtgagctcagacttggtgcttccctatccacagcccccaccccttgtttttcaagatactattattatattttcacagacttttgaagcacaaatttattggcatttaatattggacatctgggcccttggaagtacaaatctaaggaaaaaccaacccactgtgtaagtgactcatcttcctgttgttccaattctgtgggtttttgattcaacggtgctataaccagggtcctgggtgacagggagatacatgagcaccatgtgtcatcacagacacttacacatacttgaaacttggaataaaagaaagatttatgaaacgtgtctgtgtttcctttgacccacagcacctgggccctgagcagcaggcttcctatgttcagtggccagaagcagagcttcaggtacattcgtggttttctccggtggacatgggtcctcagatcccctccagcccagtgtggccaccagggcacctccttcaatagactccaaaaggggcagctcctaccatctgggagaagcaatctaaggagatcacaaaaagtaacggaacaggagtcataatctttcttgaactcctgtggtttttactgaaacttgtcagaaggcataggagttgtgcgagggctggatgggaagtctagatttaaacagccaccaggcagcttatcaaagcaagagggcatccgttcacaggacaggggctcccagcaattcccagtggcagtggggggtggctggcccaagccccaagtcacccagacacaggggacttccccttgtgtcaacagcatgctagggcccagcaaactagagggtaggtaggaccaccttggcaccaactccactcaaaccac

SEQ ID NO: 92 - DNA, 2669 bp, Homo sapiens
  Genbank Accession No. X76534
cagatgccagaagaacactgttgctcttggtggacgggcccagaggaattcagagttaaaccttgagtgcctgcgtccgtgagaattcagcatggaatgtctctactatttcctgggatttctgctcctggctgcaagattgccacttgatgccgccaaacgatttcatgatgtgctgggcaatgaaagaccttctgcttacatgagggagcacaatcaattaaatggctggtcttctgatgaaaatgactggaatgaaaaactctacccagtgtggaagcggggagacatgaggtggaaaaactcctggaagggaggccgtgtgcaggcggtcctgaccagtgactcaccagccctcgtgggctcaaatataacatttgcggtgaacctgatattccctagatgccaaaaggaagatgccaatggcaacatagtctatgagaagaactgcagaaatgaggctggtttatctgctgatccatatgtttacaactggacagcatggtcagaggacagtgacggggaaaatggcaccggccaaagccatcataacgtcttccctgatgggaaaccttttcctcaccaccccggatggagaagatggaatttcatctacgtcttccacacacttggtcagtatttccagaaattgggacgatgttcagtgagagtttctgtgaacacagccaatgtgacacttgggcctcaactcatggaagtgactgtctacagaagacatggacgggcatatgttcccatcgcacaagtgaaagatgtgtacgtggtaacagatcagattcctgtgtttgtgactatgttccagaagaacgatcgaaattcatccgacgaaaccttcctcaaagatctccccattatgtttgatgtcctgattcatgatcctagccacttcctcaattattctaccattaactacaagtggagcttcggggataatactggcctgtttgtttccaccaatcatactgtgaatcacacgtatgtgctcaatggaaccttcagccttaacctcactgtgaaagctgcagcaccaggaccttgtccgccaccgccaccaccacccagaccttcaaaacccaccccttctttaggacctgctggtgacaaccccctggagctgagtaggattcctgatgaaaactgccagattaacagatatggccactttcaagccaccatcacaattgtagagggaatcttagaggttaacatcatccagatgacagacgtcctgatgccggtgccatggcctgaaagctccctaatagactttgtcgtgacctgccaagggagcattcccacggaggtctgtaccatcatttctgaccccacctgcgagatcacccagaacacagtctgcagccctgtggatgtggatgagatgtgtctgctgactgtgagacgaaccttcaatgggtctgggacgtactgtgtgaacctcaccctgggggatgacacaagcctggctctcacgagcaccctgatttctgttcctgacagagacccagcctcgcctttaaggatggcaaacagtgccctgatctccgttggctgcttggccatatttgtcactgtgatctccctcttggtgtacaaaaaacacaaggaatacaacccaatagaaaatagtcctgggaatgtggtcagaagcaaaggcctgagtgtctttctcaaccgtgcaaaagccgtgttcttcccgggaaaccaggaaaaggatccgctactcaaaaaccaagaatttaaaggagtttcttaaatttcgaccttgtttctgaagctcacttttcagtgccattgatgtgagatgtgctggagtggctattaacctttttttcctaaagattattgttaaatagatattgtggtttggggaagttgaattttttataggttaaatgtcattttagagatggggagagggattatactgcaggcagcttcagccatgttgtgaaactgataaaagcaacttagcaaggcttcttttcattattttttatgtttcacttataaagtcttaggtaactagtaggatagaaacactgtgtcccgagagtaaggagagaagctactattgattagagcctaacccaggttaactgcaagaagaggcgggatactttcagctttccatgtaactgtatgcataaagccaatgtagtccagtttctaagatcatgttccaagctaactgaatcccacttcaatacacactcatgaactcctgatggaacaataacaggcccaagcctgtggtatgatgtgcacacttgctagactcagaaaaaatactactctcataaatgggtgggagtattttggtgacaacctactttgcttggctgagtgaaggaatgatattcatatattcatttattccatggacatttagttagtgctttttatataccaggcatgatgctgagtgacactcttgtgtatatttccaaatttttgtatagtcgctgcacatatttgaaatcatatattaagactttccaaagatgaggtccctggtttttcatggcaacttgatcagtaaggatttcacctctgtttgtaactaaaaccatctactatatgttagacatgacattctttttctctccttcctgaaaaataaagtgtgggaagagacaaaaaaaaaaaaa

SEQ ID NO: 93 - DNA, 169739 bp, Homo sapiens
  Genbank Accession No. AC005082
aagcttttactcttgtaggagcaatgagaactattgtattacagctagaaaatcacatagggcaagatacaatggagtgttcagtcatcaagcctggacttcaagtggtaaggattcagaagaaagaaatcaggaaaacctacaaaaaggaaagcagtcttgagcttagaaaaaaagtatagcatggcatatcacagcagaggcaagaaaggctgactaggaccaaggaaaataggactttatacatggatgtgtccacatgtgtacgtgtgtataatgagagatatatcaaaatttaagaaatccttctacccatatcttttccaggctttccaattttccgcatttcacatctcagcacctaagtataagaacttgcatggaatagatactcagtaaaacttaagtgaattaaatcatatttttagggtaacagctccctgaccctgcccacacacatataccgtcccatctgtgactctactgttatttgtccatcttcttgctaacatgagaactgcatattcctctagatttccctgtagatttccctattgcagggagcaataaatagcactgccttcacctgcaagcccaggttggaactagtttcatcactagggtaatgcccaacagtcatagccactgagctgacaagactgacttcccatctattcttccccaccccaccccccgccaactacatacagtatctaggtactataatcagcaaaaaaaaaaaaaaattcccatatagctctcaagtaataaatgtcaaataaattaggggtaagagtgacaagatttgagattcactgagttaatgcagttaatgaaattgtaattctctgctacataaacctgattagataggtattatgagtagatatgaagaacatttaagagaatgatttagtttatctttgagggattgttccctgtacaatatgatcattattttatctctttatttcattctgtggtatacagtttctctaagagaacaagtgaaaatattttcccccagtttttcaagtgtttattgagtggaattgaagtttcacgaacatgttatgtttatcacattgttttgtgtgcccaccactgagtaacctacggggatattaattagagaataacatcctaagctattaaggctctattttcctggtcacctaaaaagcaaaatgttcatctttgtcaggagtcaaagtattctacattaggggctcttcctttcctaagagaccattcctgatgttctgtgatactttaatccaatgaatgcctgaaacactggatacgatcataggttatcagtcagattttctcgaaggaaactcaataatcacacatagtgctttccttggtgagattgggaatggtatgaattcctatctgaccctgattattttcagaaaatagcaggaacgctgtagcttcctatctcaaaaaaagagagggtccaagatactataactttaggggcatccccccatgcacatacatggaagggcggcacaagcattcttcgatgctatcaaacatagtgaagaaacagatgctgtgaacagcccttactgtcaagtactgataggtgtgtatttctaatcattggggtgaaaagtgagtatccagagtacttagaagagattactcaagtatttccttataaacatcaacagttttaaagtccagctgactacattggctcaactcaatatagaaaattaataaagaagtccacaaaataccttctggctttagactatcagtaggataatggcaatttgagcttcatattatccattgattacttatatcacactatatatctggcagggaagggatggagacctttacatttgaaaaagcttttttaaaaaataaaacaacttattttagaatcttcttgtattgtcttcaataacagaaggaatagaagacagggtggtgatggtatatccaaatatatttaagtttattttagagccagaaaggacccaaagcagtcatgtgcctgccttttgccctccgccccatctaatcaacattctgcagaaaccacacaagattaaattggtaatagtctcaagccaaacatttgtatgtgtagtctaataaattaacatattcttatatgttttttgactgtatctttgcattgtccttttcagttatatttttttccttactgaaagcttcccatccttttctgctacaggattatagctggacagacatccgctgcccctttgaaaaacgaagagatgcagcatgcgtgttttgggacaatgtagtatacattttgggaggctctcagcttttcccaataaagcgaatggactgctataatgtagtgaaggatagctggtattcgaaactgggtcctccgacacctcgagacagccttgctgcatgtgctgcagaaggcaaaatttatacatctggaggttcagaagtaggtaaggacttcttaagtattttggtttggggcatatgctttaaagccaagtatcttggctttcatatttaaataaacagctggtattatttgtccagatactttcttggtaatttaaatatgtgtttgtcacattttagagctcatctccctgaaggtttatgtcgttgctttacaaaccattaaattacagaactttagcttcctagattaatggcccattttttttatcataatgaagcattagttgacattatctgaattatagttctaaattatttgggctgcataatattatttgttttaaagatttcagagttcaacttatagactctttaagaactcgttactatattcaggcttttaaaatttgtattatatttgctttctttttattagaaaaaagaatgctctttttcatttgttttattctttaagtttttaatgactgtagtggtatttatgcttattgagcagaatgggatgtgggtgtggatataaaaaccttattggatagtgtgttagtgtccagtagtgctctttttctaaatgaataatttttctaaatgaataggtgcaggctagatacataatagcttttgtatgctttcattttcaagtaatttctttagcttaaataatgggctaataaagaaaactagggagaccgtaaatggttatacttttggtctgcatacttatgtttttaccctcaactatatgtcaaatgaatacaagaaaaatcactatttcctaaatgtaaccatttcctctctttaaaagcattcttcacagactgttataatgtagaatatttcaaatacaataaatcctaaagatgatagacggtaactgttctgtggtactgcagataacttcatttcttcagcctttgctaagtgtgtttttagcttaagtagtagtttttttttaatctactatatactatatattttcctatagtgtccacccactgaacctaccaaatcaggaatgtttaaaaagttaaaaataagttatttttggtcatgaccattgcttcttctagttgttattttctgatctttacttttcacagaccttagttgcaacgcagaattataaaggtgttgtcgtttttaaatcatttgatattagcccagaatggtgggagatgagaaatagtttggtaacttctaaaattttttgtccttgggaaggaaaaaaaaaagcacttaaactttaatagtatcatttctaaaattttttattgaactcctacagtgtgtagaagtttcaaaacatgatgaatgtatgttttgcctttaaattgtgtaatcaaaatacatcagaaatatacatcaatattttgagaatatactcaagcagggaccagtgtgatttcaggatataccacactaactgagaatagttaggaaatataattttgttaatggtgctgtagctattccagaatattaaataagaatatgatcagatagtagttttcatattttaaggtatgggtctaccatctgtaaggaactattatgcttttccactttatataaacatttgaagtatggataattcccgtcatgcataatggggcttgaagacatatataaggcttcttatttaatttttcttttgaaatcaaatttatttttctaaagtttaattaccaataaataagtatttccaacagatccttttaaggatgttttccagggtctatacaaacaggattattagcgttttcttaaactattcctacactttgttgttgttgattgagtatgaaaatggccgtatgaccctaaattcttccttccttaactaataagatctacagtcagttctttccaaacccccgcacacactaaagttaagcatgatggggcctttttcttttacaggaaactcagctctgtatttatttgagtgctatgatacgagaactgaaagctggcacacaaagcccagcatgctgacccagcgctgcagccatgggatggtggaagccaatggcctaatctatgtttgtggtggaagtttaggaaacaatgtttctgggagagtgcttaattcctgtgaagtttatgatcctgccacagaaacgtatgtatctatttaaaatttattttacagttaactgtattctataagctctgtaggagatgtcaaaagaccagaggaacccaacagaagaattttgtccttgagtgaagagtgtatataaacttttgagtgtgctagggtcagtggcatatttatgacctggacctttcccttacaccagaaatggcttgaacttacaccccatgggaacctctttctttctggttctgcgtgcaataaatgcctatgaatgagacacatctgattgattcgtcaactcataaaatgtttttgtttgagcggtcaggaaatgtagaggaggaggggggagtttatgaccagcaataaatttatccttaagtagaaatattagatattggctcatggcattaataaatcatgcctccctagttctttttaggtgtaaacttcctaagtacatttagattcatgtttattaaataaaattattcttaaatcaactgcttttaaaaaggcaaagtgtgtcaaaaaggtaaaatgctaaagaaataactggttagccagtttttctgaccttgtagttaatgatggaacacattcaatgtagccaaaggaaatgtgctaatcattgaataatggagagggcatgagggcacgggttgtgagtagtgacattaaagctgatgaggacataaaacagatgataccctagtcgtaccttttatggaaacatccaaagagctttgataagaaaagtcacttgatcatatggctggattgcccatcgttcttcccttactagaacaagttactgggtgaatacgttcactaaaatgctatgccagagttgcatcaaaactctcgtgcttaaagttttatatttaggaaatattgccaaactacaaaacatggaagtcttcaactccagctactgctttttttaaaattaagaaataagatgccaggcatggtggctcatgcctataattccagcactttgggaggctgaggcaggcagatcacttgaggtcaggagtatgagatcagcctggccaacatggcaaaatcccgtctctactaaaaatacaaaaactagctgggtgttgtggcgcgtgcctgtaatccactactggggaggctgaagcaggaaaattgcttgaacctgggaggcggaggttgcagtgagccaagattgtgccacagcactccggcctgggtgacagagcaagactccatctcaaaaaaaaataaaaaataaaaaaataagagcttaattataaaatatgattaattatgtgcatttatctatgattcccacatatttttaaaagatttaaggaagcataatcaataacttctttccagtgcaaataatagaaaagcaagttgtcttgaaatttgtcttttgctaaagatgtttaccaactttgctcccttttatgtgaacctctaccttacttcccataaaccctaggctcaaaaagtgttacagcatactagttggaaaactgattcattctgctaattattttttatttctaaaaaatctcttaaaagagaagccataaccataaaaactctaggtttctaaatttttacatctttattcaggcactatcaatgtaaattaatattgattttttacttacttttttgttcaaagtaaaaatataaaggagttctgcagcttctgtattttttaaaactaggtgaatattcagtttcaggaatatttaaaaacttacaagacctagcatttctttcattttatatatattgagcttaaatttgaattctctatgttcccttcaatgcccttaaattttcacaaatgaaaagctagtgtgaatataattatccaactctcaaaataaatgttatattatttccttttaaaaatgttacctagtccaggtgtggtggttcatacctgtaatcccagcactttgggaggccgaggctggtggatcgtctaaggtcaggagttcgagaccagcctgaccaacatggtgaaactctgtctcgtctaaaaataccaaaaaaaattagccgggcgtggtggcgcgtgcctgtaatcccagctattcaggaggctgaggcaggagaatcatttgaacccgggaggtggaggttgtagtgagctgagatcgtgccattgcactgcagccagggcaacaagagcgaaactctgtctcaaaaacaaaaacaaaaataaaaacaaaaagttatctagccagccaagttttttttaataagaatttcttcccaattttgacattttaagtgtttgataattagaatgtgtttaattggaagctgaaaaactaagcctatggaccatagaaacacaaataacacatgttgtcactcatgtgggagctaaaaatgttgatctcatggaggtagagagtagaatgatggttatcagaggttggttaacaagtacagaaatacagttagataggataagttctaatattcagtagtacagtagggagactatagttaacaataatttattgtatatttcaaaatagctagagaagaattggaatgttcccaacacaaagaaaagatattcctcagcagcaacatgggaggcctgggttccttccctagcccaaaaagaaacaaaaggaaagataaatgtttcaggtgctggatatcccagttactctgacttgatcattacacattgtatacatgtgtcaaaatatcacaggtaccataaaaatatgtacatgtattatgtatcacatttttaaaatcagttttaaaaaagatggagaggagcagaagctcataataaagtaactgaagaaagaaagaaattatgtctatggaaacaatgtgacacagtttgagcggtcagaattttaagaaatgactttttttttttttttttgtgagacggagtctcactctgtcaccatgctggaatgcagtggcacgatctcagctcactgcaacttctgcctcccaggttcaagcgattctcctgcctcagcctcctgagtagctgggattacaggcgcacgccaccacacgggctaatttttgtattttcagtagagacggggtttcaccatgttggccaggatggcctccatctcttgaccttgtgatctgcccaccttggcctcccaaagtgctgggattacaggcgaaaaaacgcttctaaacattaaacttcagattgcagatagcggggacctagtatgtactctgcatgtgaattataggaggaaggggaatttgtgaaagttttttctaaaccttcaggagatttagatatacataaagacatgctgtctttttatatcattaacattatatttggagaagaaagtggtatgtaaatggaatttttccaagtcaaatactgtgttttaatgcatgatgatagctgagtctataaatctcactacgtgcagggcagtgaagacctagtttttactgctgtcccacttccgagctgtatgccggtcacttcacctggatgagcgtgtgtgtttttcctaaaaacaggagccatgctgtccacctcaccttaacagagaactttgaaaatgagagtggtgactgtcaaaccatttttaaaacaatacataaatgtaagacaaaagaattgttaatacttcagagttaatcattgtgccttaattatgttttataaagttgaattcatcaaattgttttttgttttttgagacggcgtctgcctctgtcgcccaggctgcagtgcagtggcgtgatctcagctcactgcaagctccgcctcctgggttcacgccattctcctgcctcagcctcctgagtagctgggactacaggcgcctgccgccacgcctggctaattttttgtatttttaatagagacggggtttcaccgtgttagccaggatggtctcgatcgcctgacctcatgatccgcctgcctcggcctcccaacgtggtgggattacaggcgtgaaccaccgcgcccggccggccatcaaattattttaaagaagagatataaacaataattatagagagttactcttatgccaagtttcccttttgttgttgtccttactgttgtttggcgtctcttggtttaagttagctgctgaaagcacaagcctgtgtgccagtaccaccttcacaatcacaaatgtcagtcttgggagtgtatgcagaagaatgtattaaatctcagaaaaaaataactaaactcgattgtctgtgtatatatgcataatgctgcaacctgtgaattaatatcctttaacacttgggtccacatttatattctcagtttcattatttatatattagtggctgtgaacagagcaacatgaggtattaaacttgacagaatgatagtacttttttgttaccagagcagcataaagttcttagtgtagatttaaagatggacatgtgaatagtaacagatactattaatttcctgattgcctgaggcccattataagtttgtgttttacttacgcatatataaataataattaaagctaggtgtgatagaactagttaatatttcctgccagcagaggtgtgaagaaagaaaaaagaattatttatcttcgaagcatcttcctcttcttttttgttcccatattacaagtttttatgaacctcaggaaatggatttcctctaaaaacgtgttttttaatagatatcctcattttcttatatcctatcagaattgaaaggaataaaatccatgttttccccgtgtattaataaattacccataatcattgttcaacttttgttttctacccttctagacattttgtgcgtatatgtacacatatgtgagtagtaaatgagcacttaattagaataatagacctttctcattagtatgagttcttttacttcctgtaaacaagcacactaaaaactttaattttttcagatggactgagctgtgtccaatgattgaagccaggaagaatcatgggctggtatttgtaaaagacaagatatttgctgtgggtggtcagaatggtttaggtatgtgatgttaattcactgttccactttcctgatgagtttgctgatacttccttaaattattgaagcatttttaaaaatctagatagaagcatttaccatgtatattattatatctatttttatagtttctgggaattaacatacttgataaaatatcgcaggatgttaaacattcctgtttatgaaatgtcgcagtagtcaccagtcattgtgacaattttagatggctcctatacattcccagatacctcctggggaatgatgtcgcaccagcttaagaactattgagcaatagaaatatttgaactttaaaaaacctttaaaaactttttaaatacaagttttaaggcttgtatccaggtcctaaatggtaaagtttcctaaatatttttaaacattgcatgaaaatatcaatattgtaatttttaaatgactaaatttggcattttgttttcataaataatgtactaaagaatcttaaataattgtcttaaatgaaagggagtcggaactgaatctagacacaagcttcaatttagtcagtactttaagcatcacttaagtgtaccagtaacttcttttccttcttctgtccctgtccattgctattttccataaagtgctaaaaggaggaaaaagaaggacatttgagtaattataatcaaagttaatcagaggggaaatcaccgattggtttattttgcatttttccagaatagataaaacatgtttaattttgtagaaaaaaatcaatatttaaaaagaaatattaaatgtctattgtgttaagagtaagaatttaggtggtggctatgtggacattcactgtaaaattattacagtttttctgtgtgtttgacatttttcacaataaaatattggaaaaatacaaaaagttattactttaagaaaccttagaattgttgatatagtttttcatgttgttcatgttttattcttttgaaggtggtctggacaatgtggaatattacgatattaagttgaacgaatggaagatggtctcaccaatgccatggaagggtgtaacagtgaaatgtgcagcagttggctctatagtttatgtcttggctggttttcagggtgttggtcgattaggacacattctcgaatataataccgaaacagacaaatgggttgccaactccaaagttcgtgcttttccagtcacaagttgtttaatttgtgttgtcgatacttgtggagcaaatgaagagacccttgaaacatgaaaaatgagtggacttcagactcatcagagactctaaaatatagccaccagtgctttgttccaggagtttggtgacaaagttttggtttggtgttttggtaaagaaagtttcaagtgaaatgaggttcctataaaatagatgtttcttttatatggatttccttaattcaaagatcatattttagctggccacaaaaccaagaacatatctagcaagaaaacttgaaaaagtataagcatttgttaaaaatgtgaatttcttgaatgaatttcacatttgtaactatgattttggcagaatagaagattggctcatcagtgaagcgcagtatcttagctctagattctattttcatgcatcacagaagtgctatacggttaggtctgtttgtgctcagtcaagaactaagaaatagtatgaattgtaagtcaagatgggcaactcagatggagcagcttagtctcacagtttgcttgtctatttattttatttagtgccaaatgtattccattttaaaagtaagccagagtgagtcaaggcatatacacactttctcacaaaacttcctaaacagatttgggggtttaatatgtccaactcctcatgaaatatattcaatccacttaaatatattccatctttttaacataaaatgtaaagcttagcacccatcattaatttatgtctctgttttatccagtggttaaaaaaggattctgcctctttagtcctcactgttaaataaaacccaatcatagtaagtgattaactagcaaaaagtaaagctatttatagcaaatttctagatcattagaaaagcactggtagttgtacaatatcagtgttgactttgaacttctttaacgagatcatgaattcttttcccttagccaaaacatgaaatatttaacctagttgtctctaaaagttttgtaatcatgagttagatatatgtcatctcctattcattgcttttatgtgatcaataaatcttttacaaacccaactactcatttccttcctagtaatactttgcctttttcactgtgtatggaatgaaacatgtaaagctgtcacaatcaatgtttttatctgataatattaaatattttttaacttaaaataggccactcagtttgttcttcaagtattttaggtaatggttgtttttagaatttgtgaaccagtgtctcttaattttcagttttctttatatagaggttataatagtcttaaaccctaaaaatgtttaaatcaaaaaggaattaggaaaaacataatgataggtatatttctatttgtgtagggttttttaatgtacagctttattgagatataattcacataccatacaattcaccatttaaagtatactattcaggccaggcacagtggctcacgcctgtaatcccagcactttgggaggccaaggtgggtagatcatttgaggtcagcagttcaagaccaccctggccaacatgatgagaccccgtctctactaaaaatacaaaaattagccaggcctggtggtgtgcacttgtaatcccagctattcaggagactgaggcaggaggattgcttgaacctgacaggcagaggttgcagtgagctgagatcaagccactgcaccccagcctgggcaacagagcaagactaaaaaaaaaaaaaaaaaaaaaaaaatgtattattcagtggtttttaatatatccacagagttacgcaaccatcaccacaattttagaacattttcatcaccccaaaaagaaaccttgtactgattagcaatggttccctatttcccccaacgcccctgtatttcctagggctaccataacaaactactgcaaacttggtggctttaaagaacagaaatttattctctcacaattcaggaagccagcactcctaaatcaagttgtcagcagggttagttccttctggagggtctgcagcagaaaccacacatgcctctcccctagcttctggtggttgccagcaatcctcagcattctttggcttgtagctgcagcacttcagtctctgtctctgtcttcgcatgggctttttccctgtgtgtctctgtatcttcacatggtgttcttataaggacaacataggagccagacacagtggctcaggccggtaatttcaacactttgggaggtggaggcagtaggatcacttgaggctaggagttcaagaccctgtctctacaaaaaaataaaaagttagcaggtgtggtatatacctgcagttctagctactcagaaggctgaggtgggaggatcacttgagcccaggagttcaaggatgtagtgagctatgattgtgccactgcactccagcctgggtgacagactgagaccctgtctcattaaaaaaaaaaaaaaaaaagctgggcgctgtgtctcacgcccttaatcccagcactttgggaggccgaggcgggtggattacctgaggtcaggagtttgagaccagcctggacaacatgccaaaaccccgtctctactaaaaatacaaaaattagccaggtatggtggtgtgcacctgtagtcccagctactcaggaggctgaggtaggagaattgcttgaacctgggaggcagaggttgcagtgagctgagattgcgccacttcattccagcctgggtgacagagcaagacaccttctcaaagcaaaatacaaacaaaaaaaggacaacatagggcccgcaatccagtatgaccttattttaattacacctgtaaagaccccatttccaaacgaggacacattctgagcttctggatagacatgaatttggggagatgctgttcaacacagaaaacctcccaaacaccatagccctaggcaaccactaatctactttctgtctctagatttgattattctgaacatttttagtagggttttcaattttgcactctattgaaaaatgtggctagtttaattttttgagagtgaaatatccatttattatattacaatatagctatataatttgacaatctcctatgtagaatatacagtacctgtctaagatattttaagtacaccagcatttccttttaggctatgtcaattgactagaacacactatagtaaatacatacacaggtttgatgtggattataatgaagtggtttttttccttagtaatctgtatcataattcccaattagtgtctttttctgccttggaaatttctacagaattgtcaatatcaggatagtgcgtaaaagtacactcaccatactgacaagcacattttctattttgttgcccaaaactccctgtcctgtaaagtgctctgcttgctttttagtagacatttgataagttaatgttatatcctttgcaatgatattattttgatgacaaagtaagtttatgctttcaaaaatcacaattcggtcagaaaagtttagcatcttaaaaaaattgttgctatttgaaaaaaacaaaacaaaacatatacttgtgactttgtggtccagctggcaaaaacttgacatatcatcccatgaaaattttaagtcatgaattattttgacatgacaatattgctaacaaaatcaaaatcagccgtttaataaacaattattccaccaagcagtctatattccttttgccatatatactgttaacagcaaaaattttggatttgctacatatgcatgggtaaaggaggtatttagacgaaattttgctttctaaggttataccaaagacttgagaaaatccaatttactcccacatggcaccaaaccagctctcactgagagtcattatttggacccttaagtccaaataatctgttcttttaatgaaaggacattttacaggtggcatcattcagcgtttgataaatccttcctttaaatagcctcctccctctttacagttgcctcaaaagacttcaaaaagcttgaatccacttttatctttctcaccttcctccttcccaagatgattcacactactttagaaaaaataaaaattttatttaaaaaagtctgtgctgggaaattgtttgaaatgttgcccttattaactagaaatctttttactctccagagctttacgccctctctcataacagatttaaaatggggttcaagatctagtttgaatcttatagaaattccctcagactttatcttctaaccttctttaatttgttcccactatctacgttttccaagagtactttatttctataattgttcttttatatagtatgccattcttgtttcatgttatcctctctgatgatattttagtttctttaaattttaaaaatattttagtgtttttgtttcctctaacttctttttctgtttctttgctttgctctttcctgttggcatctgccttcaaatgtctagtccctgactgtgcatttggatttaaatgagacatctgaaaattgataattcaggggtacaagggtgagcttaatcaatgaacttcattatatgatgaggagatggccaactatttttgttgctagtccataagagatccataggtatttttctgggatgtttgactcaccattcaataagcataagccctctctgtacctgatgtcctagaatctgaagtgtctctcattcctttttattggggaggaatcctatctcctatcaagtcgagacagttgcctcatccaattggaaggggaggcagcagtatttttcctctgccatcttgaagaaatcagaagtttccttcctgtaaccccactctcctgatttccacctatatatacccatcaccaaaccgatcactaccaagtcctgcaagccctaggctctcattgtctcacacacactccacctagacagtctcaaccggcattctggccttgcccctctctaccttcaccaagcactgggcttaccctcacttaagtttcagtcaccactggtattattttaggtatttgatcccagcaaagtccttacacatgctgacatgtgcaggaatgagaagtcagtggctacaaagcaatactggttaacacaaggtggtaataaaataaatatactaaggttaatgaaagccaagtttcttgttatcaatggagttaaaaatagaggaaaataaaatgaatcatgtgattttggattgaaattggagattatcagtgtgaactcaagtttttttctttttttcatagtctttgacatagaaggcataatagttttaatatataaaatatagaaatgtttgatgtaaatgttcgtgtttgtttatacatatgtatttcccagcaatgttcatgacagcaaagacatcccagtagcaataagcacattaaagctcagatcttggtttctaagcagcaccaaaaggacccctggagaaataactgatttcaggactggagtagagaatgtaaaaatgagcctggaacatctctgcaccagaaagtaaaaaagtgctcaagtaatcatggggaatttttttttctcctttttcgaatgtgtaaaggagcttaaagggggtcccattggccaaattggagatgatctgagcatcaaaataaataatgatagtaatggattataacccattgaataacattggaaatcatgagtccatactgatataaataaataagtgaatgagctaaaagttggatgaacaatcagatttttatatactttcaaagtacctccccacaaaattcttattaataacaaaaaggaaaagaataactttatggtagagcagcttggcagacaccaccttaagcaagtaatccattgagcattacaggtaacaggacaaattgaaattgtgcacaacctgcaatgtgaaaaccgcagcatcacttctgtgataatcctgacaaagatgcataatctgaatctaatcaagagaaaacatcaaacagacctgcactaaggaacctctacagtataagcagcctgtagtctttaatagtgtcaaggtcatgaaaaggaaaaacaaaaaatcttccaaattgaaggagacacaagaaatatgactaagcaacaatgattccgaactgaacccttttcctctaaaggacaatattgggacatttggcaaaacataaatggagtctaaggattagagagtagtagtgcatcagtatcaatgtcctaattttgttggctgtgttgtggttatgtagaatgccctggtttgtttgtagaaaatatacaataagtatttggatcatggggcattaggtctgcaacatagtctcaaatggttcaggaaaaaagttctttgtactgttatttgtaacttttccataaatttgtttcaaaataaatgaattgcattgattaaagaaaataaaaaactagtttggacaagtagttcccgtcctgtagattctgctgtcttcaaaatccaaacaaattacatgagcaagaatgatggctcactcccagctcaataatcctaaaaccaccagcacaaacctgtaatccaacaaagtcagatctattgacttattgcaatcaagaagactgcacaccagaggagctgtggtgtgtctcaccgtacaaaataaaaggtagttattgtatgttttggcggggagagtgaagtttaggtgaaatttaaatgaaatctcaaagcatagctgtgtgtaaaggcattaacatcaggtctggacgagaattgaatgtagggcatgtttccttggaaactgcaaagttaagaaaatacagaatgttttcagaaccgtttatctgaagctctacacctggatagaaattgaggctgcttctctgcgtcaaagagacttagatcctccaggcaaggatgggacttttcactcgttctgatataatttcaaatagcaacgtttatgtggacttgaaagaacaaggtttcggccagacgcggtggctcacacctgtaatcgcagcactttgggaggcggacgcgggcggatcacgaggtcagaaaatagagaccatcctggctaacacggtgaaaccgtgtctactaaaaatacaaaaaaattagccgggcgtggtggcgggcacctgtagtcccagctactcgggaggctgaggcacgagaacggcatgaaccttggaggcagagcttgcctccaagctctgccactgtactccagcctgggcgacagagcgagactccgtctcaaaaaaaaaaaaaaaaaagaagaaataacaaggtttctcagtgtgtagtaagaatgtacttaagtggtaatacttttccgttgcagcatgtcctaaaagaaacattgtttcctcttaacgtcgtctggctttatttgactctgttatccatccagatgaaaggctaggcagtttgttactttctcagcccaagctaagttttaccgtctcagcaagaacgactcagtctctcaaatcatagctaattctcctctgagggccttgctgaagttctgcgtttgcttgctccgctttcctctcattttggacctccagccttcctgtagtccgaggccctgcaccggggtcaaacgcgcctccggtcttcacgtaaccgttcaagcatccctccttcccaggacacactcaaagcgtcagagcggtccgctcttctcaagtcctattggctcaagtccatgcgtctcatggcactgccgggtgagaggcggaaaaaggccttcccaggcgcgagaagatgacgtcacagtagcccggccgggcgccgaggttgccttagggctctctgcccagtaacaggcatcgaacggtgcagactgaagacgccctccgtcagcgacgccgtcgcaatggccatttgtcaattcttccttcaaggccggtgccgctttggagatcggtgctggaacgaacatcccggtgctaggggtgcaggaggaggacggcagcaaccgcagcagcagccttcaggtgactctcctctgaatcctccgcggtaaccgagccgggaagggtccgccggcggggaccgggcgtcccgcgtgtttcccgctgctggtgaccccaacgtgcccgcgtcgcggccttgccggccctactgggccctgcacaacgtttttaaaccgagggttttatctacatattattcatgtggtccgtttttattgagcttctgaggacctgggtttgggcctggatgcttgtgcgaaactgagtttttaaatcggaagtacctatcgaaactaccttgtaggtaaatgccggaattgaatataatttttactaagttgttttttcgagggtgaggctagcagcttgggtcagaatcaggacttcattttggagaagtcgtggacttctttgaaaaaatctaataaaaccggccgggcggtggctcacgcctgtaatcccagcactttgggaggccgaggcgggcggatcacgaggtcaggagtttgagaccagcctgaccaacatagtgaaacaccgtctttactaaaaataccaaaaaaaaaaaaaaaaaaaaaaatagccgggcgtggtggcgcgcgcctgtaatcccagctactcatgaggctgagacaggagaatcgcttgaacccgggaggtggaggttgcagtgggccgagatcgtgccactgcactccagcctgggcgacagagcgagactatcaaaaaaaaaaaaagaaagaaagaaaagaaaaaaagaaaatctaataaaacctatagagccataccgcaaaaatgcacctgctcataaatttggggtgaaattgggaatgtgggacgcccagttaagggctatccgggaggtgaggaaaggagatgcgggggccacgttgatctagtccctgggcctagatcattgtcaaagctttttatcttcaaggaaaggagagattagacatgaaaccttagaacaacacaagatttttaaagatcgggttaataattcggtgctgtctcccttccttcccctcctttagggctattcatctgacctttatttttttattttattttgagacggagtcttgctctctcagtcaggcggctcactgcgacctccgcctcccaggctcaagcgattcttatgcctcagtctcccgagtagctgggattacgggtgcccgccaccatgcccttgataatttttgtatttttagtagagacagggttttgccattttggccataccggtctcgaactcgtgacctaaggtgatactcccgcttccgtctttcaaagtgctgggattacaggcgtgagcgaccgcggcgggcctcatctaacctttaaaccttgtattgcgtgatggtttcacgtctgatcccacttcagggaagacagtccttttatttcctccacaattaatctagtgaaatatttcagaccgaaaattaggactcatgtctgatgaatgtgagtgtaaacaaaatttggcagacaaattgtatttagctcccagaaacaaatgaatgtttctggaattataagtatgaagaccaaaagcaatgtaaaaaaaaaaaaaaaaaaaaaaaaggaggaagtgagtttcttcagttgtatcatcccccagtgaatttggaactttagaagaagaagataccattaacttctacttgagggatctggtctagcaatctccactttttttttttttttttttagggtagtttagagttgcaggatgaactttcacaactgggcatgtgtgtcattctaacttttaatataattaatggcttatctctttattcagtcagaaacaagatgaattaccttaatcttggccccaactaggaagtgatgagtaaatgagattgctaaaatgattttaaaaaacaaaacaaaaccaatatataaagagaggagagaatctttttggctcattttgatatttatgaaatattggaaagctggtagaggaactacatgcattctgtacacatgtaaataccatgtataatctctctgtgaaaataggtgtgtaggtgtttgcccagagaaaagactgcgtcaaatagacttaagcatctgtacaaaaacagagggtagaatgtaatctttcatattcgagaaactttaattcaatgtccatttttcagcctttactacagtatagggcctggtgggggagcaaagaatgataaaaacccaagtttttatcctgaaggagtttatgatttatgatgcatgccttctgtcaacttttaactatcaagcagttgttcatttaataagctttgtcagctgaatttagtaatatatcactatttttctatattattttcttctcaatctcaaacaaaaatgcaattggccactatgtgatttgttgatattacaacctaactactgtatataaataaaaaatgaagagattgtcatttaaaatgagtttaaatgtagtgcttgttgaatctttctatattgtctagacatactaagatataatgaagatttttgagattttaaagaacagttgctgggcacagtagctcatgcctataattccagcactttgggaggctgaggcaggtggatctcttgagcccaggagtttgagaccaaccccgggcaatatggcaagaccttatctctacaaaaagtacaaaaattagccagacatggtggtttgcgcctgtggtcccagctactcaggaggctgaggtgggaggatcgattgagcttaggaggttgaggttacagtgagccaagatcatgccactgtactccaccctgggcaaaagagtgagaccctatctcaattaaaaagaaaatagaaagaaaagttgctagtaaaattattttgttttattgtttattttaggtaataatagacgtggatggaatacaactagccagagatattccaatgtcatccagccatccagtttctccaaatccacaccatgggggggcagcagagatcaagaaaagccatatttcagttcttttgattctggagcttcaactaacaggaaggaaggctttggattgtctgagaacccatttgcttcacttagtcctgatgagcagaaagatgaaaagaaacttctgtaagtgaaagttttcaggaaaattactatccatttgcttatgttttttcacctacaatctttgttgtttctctttttttgtaacatcttttcacaatacaatattttctttaaaaaaagaaataatgcattatttttaaatcagagtagcaaaaagaagaaaaatcacccacaattctatcactcatagatagccactcttttgctgtgtattaccctagattttatttcacttaaaaatatatcatctttctataatagtagagtgccttcctaggggtaattacgctttttccactttgtgttgataacactatattgtgaatatctttctaagattagtcctgcttaagttcattctaacttacaagtcctttacaaagtatgatgtaatttagaacaacttgtgaacttggaggtcattttaccatctcatttatttatttatttatttattttgagacggagtcttgctctgttgcccaggctagagtgcagtggtacaatctcggctcgctgcagcctccgccttctgggctcaagccattcttctgcctcagcctcccaagtagctgggattacaggctcctgccaccaagccagctaattttttgtgtttttagtagagatagggttttaccatgttggccaggctggtcttgaactcttgacctcaagtgatctgcctgcctcagcctcccaaagtgctgggattataggcataagccaccatacccagccacatatcttatttctttctaaaacttttacttggattatcctattcaaactgatctcatttgatttcctacatttattatggagtagatacatgacatttcttgagaatatttatggtaaaatttatggctggtgtcaaaacaatgcttggctatctgtaatgttctctcaactcatggtgactaggatggaatttaaatgtaattggttagtcttttacttatcctaattaaatcagaaccagttgtagacatgttgagtcatataccatatacaaccgatttttttttaagtaaatgagcaaacaaaaccttcctttctgcatttgttgcaattctaaatttaatacagttttctctgtgataattctccttttattgacatagtctaagtagggagaaactttaatttagagccgaatctacccacggcattaccacagattagttgtatggatgtgggtctgtttcccctgttgcaaaatgtgagaattagataaaatgatctctgaagtcctataacccacttttaaaatattatgattctgtatcacgtaagtggtactttgttcttcccagttaaatgattattgatgtttgtgataattaacaaagattaaagttagtattttagattttaattcctaaaaaaagtatggtatctatgatagtatttatgtaattactatcataaccaatgttacatatcataccaatgataccatatgatatggttacatatcataaccaatgttatgtattaacattggttaatgggtcagtgtattggaaagccaaactcattaacttctctgacattataatactatttgtaaccatgaaatatagttcacacttctataaacttgtgctttaaagaacactcttcagaaaatataatggaaaagtatttactagaatttaaattttcagttgtggaaaaccattaacaataaattttaccaagcagctaagaagatcctttactctttttttttttttcttttttgcagggaaggaattgtaaaagatatggaggtttgggaatcatcagggcagtggatgttttctgtttattcaccagtgaaaaagaaacctaatatttcaggtaactgaaaaattgtgcatttttaaagtatgttctaaaactattattttctaaaaccaaaagaatgccaaataaagaaatcaactaccaacttagctacaactaggagagtttgggcattgtttaaagtattcgagtattctagccaaacttcataatttagagattaaggttggagaatatagtcttttaagacatatagttcttgggagaaaacatttaaataaagcccaggaagagactctacgttcttgattccctgtatgtacaactttggaacctcttagcttcctgttgtgaatagaagagtcatcctgcctgtcattaaggccttggctgcctggttctgttctttcttccctgtctttccttctaagaatagttgtgttgagacctgttctggagataatgtttaaatgtgaggaggcttagctgggctacagggatagcaacttttttttttttttttttttttttgagacggagtttcactcttgtcctccaggctggagtgcagtgacgcgatctcggctcactgtgacctctgcctcccaggttcaagtgattctcctgcctcagcctcccgagtagctgggattacagttgcccgctaccacacctggctaatttttgtatttttctagagacggggttttaccatgttggccagtctagtctagaactcctgacctcaggtgatccgcccgccacaggctcctaaagtgctgggattataggcgtgagccaccacacctggcctggaatagcatttgctttagaatattctctgtctctctctctctctctggcctggaatagcatttgctttagaatattctctctctctttttttattttttatttttatttttttttttgtccatagtccctaagccctttctgggctgaaacctagaccaccgggctttcccaagcccactctgggtgttcctgggcctccgtccttttgaggaaacagtgggtaccttgcaaatgggagctcttgcaatcaatatcgcagaaccttgggatctttcctctgtctcagttctagttgctcattttctgtgagcatttgcattacaacgcttcttatttattcacttgtccatttaacaaatatttactgaatttcttttgtgctaagtgctaggaatatagtgatgagcaagacagacaagatcccttccttatgaatcttacattcttgagggaggaaaacaataagtgatgcaaataaactaagataatttcagataatgatattttctataaagaaaccacaaagtattaagcccttaatcagcttaagtattagtacttgagtattaatccattccaaattgaacctaatgcctgttgccctaaagcagtggttcttaaaatgtggattcctgaatatagttgtcagataaaatatgggacatccggttaaatttaaatttcagataaacagtgtttttagtatgtgtacatgccatgtaatatttggggcacatttatactaaaaaaagtatttattgtatatctgaaattcaaatttaactgggcatcctgtatttttatttgctaagtctggcaactttatccctgaggcccttttaggagttgcctgagttcaaaaatattttctgataatactaagtgattaattgccatttttcactgtgttgacatttgcactgttggtgcagcagcattgaggagtagaactacttgtatcttagcaagaatcaaggcagaggcaataaattactagtagatgtcacaataaaaaaatgtttaatgccatttgaacttaagaacttcctttatgaagagataaaaattattaattttgttaacccttgaccctgagtacgcacctttttagtattctgtgtgacaaaatgggaagcacacaaaaagtgtgtctgccccatgcccaagtgtgatgaacaatcttgtgtaattgttcaagttggactgagctagccacttttttcaaagacaatatttatttgaaaggaatgacaactatggttatttagaagaaaacagttgatagtgtttattgccaatgaaaaaaattaaaactttcaagcaaaaattgaaattacggaaaactttgtcatcgtgagcatgatggcttctcagtacttaaaatctcttctgattaaatggatggcaacattcacaaatgtgagggccacacgcagcagctcatgcctgtcatcccagtgctttgggaggctgcggtgggagaatggcttgaagccaggggtttgagaccacctggacaatatagcaagaccttgtctctacaaaaaatacaaaaattagcctgagtatgatggcatatgccaagactcttagctactctggaggctgaggtggggggatcacttgagttcaagagttcaaagttatggtgagctctgatggtgccaccacactccagcctgggtgacagagcgagaccctgtctctttaaaaaatttttttggctgtgcacggtggctcacacctgtaatcccagcactttgggaggccgaggtgggtggatcatgaggtcaggagatggagaccatcctggctaacacgatgaaaccccatctctactaaaaaatacaaaaaattagccagacatggtggtatgcgcccgtagtcctagctacttgggaggctgaggcaggagaatggcatgaacctgggaggcggagcttgcagtgagccaagattgtgccactgcactccagcctgggtgacagagtgagactctgtctcaaaaaaaaaaaaaaaaatttttttgatgttgtataataacgtgccaatgtttagaagttctgcataactcagtgaactggcatttttcaaatgacttatatgtgatattacaaaattatgcatggctgaaagtccattctacatgcatgataaaccagtgaatgttaatataatgccacaaaaagttcattagtatggcttgagtctatgttatagttaacctttaaaaaactaccacttgttaagttttggtgtagtatcaaagaaaaatgtccacagttatttgaaaaagccatttaagtcttccttttccaatacgtgtctgtgtgaatgcccattttcttcatacacttcagtcagaacaacatattgcaacagaatgaatgcagaagcatatgtaagaatccagcagtcttctattaagccaaacattaagagatgtataaacataaagcaaggctattcatcttactaaattttcattttttgttttggaaaatagctttttcatttatgtagataagtaattgttttcttacttttaaatgaattaatactaagtttctcagttttcatttcaaatgtggtaattatcaatgtaagtaacccttgtaaacaaacattctttggggtccttaatgatttttaagaatgtaaaggagtactgagaccaaaagtttgagtacttctgtccttaggcatccattgtattaataaattaactttttccatgcagctataatagaatgatactacttttgtcaattttggcttttgttgccattgcttttggtgttttagacatgaagtccttgcccatacatatgtaacaaacctgcacattgtgcacatgtaccctaaaacttaaagtataataaaaaataaaaataaaaaattaaaaaaagaatgatactacttttgccccattttgcaagacttgagaaaattatcactcaaatcattttctgtgttctgtggtttggatgaggaattctggttgagcacagctggaaggaataggcaattaggggaacaatatttctttagatagagtggttatctattcctgggagacagtattggaaatgagtcctgaataaagagagggtatcagttatgggaagatttggggaaaacattcctggcagtaggactagctattgcaaaggccctgaggtaagaacaaggttggcagtgtttacagactagtggggcctgaattactggaggagagtaaacaagggaaagtaatatgacagtaaggccagagagatagccaggggccagatcatgttgggcctaattgcactgggcaggcagccatgaagaactttaagcaaaagagggacgtgatctgattagaaaaagctaactcagcatgctgtgtgaggggggagaaaggtctgttgggagccgtggcaaaagtagagatagggagacaagttagaagacattgctgcttgtgactagagttcatagcagtgaagacagaattggtcatatttgggttctctgttggagcttgaactggcaggatgctgattaactagatatagggaaagagaaatccaaggtgattcctagggttttttggcctgagaggtcagtaaagatggggaagacaagtcattagaaggaatccagggaaacatttagtctttcctttactctgaagcaggtgtccttggagttaataataactggattacaaggaattctttgtagaaaatatcttgaacattttttgcctttcttagtaagtttgcccaattataaaagttacagcttttgggccagatgtggtggctcatgcttgtaatcctagcactttgggaggctgaggcaggtggatcacttgagcccaagaatttgagaccaacctgggcaacttggcgaaaccctgtctctaccagggtgtggtggcacattcctatagtcccagctactcaggaggttgagatgggaggatcactggagcctaggaagtcaaggcggcagtgagccactgcactccagcctgggtgacaggaatgagactgtgtctcaaaaataaaaaacaagttacagcttttgctttagaaaacttggaaagtacagaaatatataaataaaataaaaataacctgatatcacagaggtaactactacattttagtatatttctttcgaaacatatacacacacaaacatatttcttgtttatgtatacaattgacccttgaacaacataaagtttagcggcactgatcctctgtgcagtcaaaaatccacgtataagctttgactccccaaaagcttaactactaataacgtactgtaagagaaaagaaaatgttaagaaaatcataacggatcaggcgcggtggctcacgcctgtaatctcggcactttgggaggctgaggcgggtggatcacaaggtcaggagttcgagaccaacctggccaatgtggtgaaaccccatctctactaaaaatacaaaaaaaattagccgggcttggtggtgcatgcctgtaatcccaactactgtggaggctgaggcaggagaattgcctgaacccaggaggccgaggttgcagtaagccgagatgatgccactgcactccagcctgggcaacagagcaagacttcatctcaaaaaaaaaaaaaaaaagaaaaagaaaatcataaggataagaaaatatattgaccattcacatagtggaagtggatcatcataaaagtcttcatccttattgtctttatgttgagtagcagagggataggtgggtgtggtcttgctgtctcaggagtggcagaggcggaagaaaatccctgtacaagtggcccctgtacaagtggaccctgtacagctgtgtgtacagttgacctttgaacagaactgcaagggtccacttgtacagggatgtataagttgttctatgtgtgtatatatgtatacctatgtgtccggaattggtgggttcttggtctcactgacttcaagaatgaagccacggaccctcgcggtgagtgttacagttcttaaagacatcgtgtccggagtttgttccttctgatgttcagatgtgttcggagtttattccttctggtggggtccgtggtctcgctggctcaggagtgaagctgtggaccttcgcggtgagtgttacggctcttaaggcggcccgtctggagttgtttgttcctcccagtgggttcgtggtctcgctggcttcaggagtgaggctgaagaccttcgcggtgagtgttacagctcataaaggcaatgtggacccaaagagtgagcaacagcaagatttattgcaaacagcaaaagaacgaagcttccacagtgtggaagaggagctgagcgggttgccactgctggctggggcagcctgcttttattctcttatctggccccacccacatcgtgctgattggttcattttacagagagccaagtggtctgttttgacagggtgctgattggtgcgtttacaatccctgagctagacacaaaggttctccaagtccccactagattagctagatacagagtgtggacacaaaggttctccaagtcccaaccagagtagctagatacagtgttgattggtgtatttacaaaccctgacctacacacagggtgctgattggtgtgtttacaaaccttgagctagacacagagtgctgattggtgtatttacaatcccctagctagacataaaggttctccaagtccccaccagactcaggagcccagctggcctcacccagtggattccacaccagggccacaggtggagctacccgccagtcccgcggtgtgtgcccacactcctcagcccttgggtggtcgatgggactgggtgccggtggagcagggggtggcgctcctcgtggaggctcaggctgctcaggagcgcacggaggtgagggggaggctcaggcatggcgggctgcaggtcccgagccctgccccgcagggaggcagctaagacccggcaagaaatccagcgcagcgccggtgggccggcactgctgaggacccagcacaccctccgcagccgctggcccgggtgctaagcttctcattgcccggcagggccagccggcagctctgagtgtggggcccaccaagcccacgcccactcggaactccagctggccagcaagggccctgggtagctctggttgccactcgcgcctctccctccacacctccctgcaagctgagggagccagctcaggccttggccagcccagaaaggggctcccacagtgcagcggtgggctgaaggtctcctcaagtgccaccaaagtgggagcccaggtagaggaggtacccagagcgagtgaggaatgtgagggctgccagcaagctgtcacctctcacctatacatatatacgtatacatatatatgattaggatcataatctagtttttctttgttttttgttttgttttgtttttttgagacagagtttcgctctttgttgcccaggctggagtgcagtggcgccatctcagctcactacagcctcggctggccttccgggttcaagcgattctccagtctcagtctcccgagtagctcggattataggcatatgccaccacgccgagctaattttggtatttttagtagaaacagggtttcgccgtgttggcccggctggtcttgaacttctggcctcaggtgatccaccggccttggtctcccaaagtgctgggactacaggcgtgagccaccgcgcccggctgtaatccagttttttttgtttttgcttttgtttttgtttttgttttgagacggagtctcgctttgttgcccaggctggagtgcagtggcgcagtcttggctcactgcaacctctgcctcccaagttcaagcaattctcctgcctcagcctcccgagtagctgggattacaggctcatgccaccacacccggctaattttttgtatttttagtagagagggggtttcaccatgttagccaggatggtctcaatttcctgacctcgtgatccatccgcctcagcctcccaaagtgctgcaactacaggcgtgagccaccgtgcccggccctagttttatattctaatttttgctttcagtttgtctctggtactaaaaatattagaatgaacacccttatacatagcaacctttgtttacatatataactatttcccaaggttaaatcctataaattgtattataagtcacaggatatgaatgtttttcaggcttgtgatgcttattaacaattatccctcccagaaaacttgtaccattttaattcccttaacggtaatttaggaaatgatacatttcaccacatttggaacaacagtaaataccagcttttaaaatttctgccagtctgataagtaaagcattttatctctattttaagttgcatttaactttatttcatttatttactatttgattttttttgtgtgtgaattgcctgttcattatctttgcccaaattcatttacttttctcatttatttgtaagagctatttgtacattagggcattagttcttctcttgtcatatatgttaaaattgcaattttcctagtgtaccatttgccttgtaattttgcttagtatagtttctggcagaatttttaaaataaaagtttgaatataaatgtagtcaaatctttctcctgtgtttgttgttcattctacgccacttatctttagaaaatcttccccatttaaagatcagaataaccaactatattttactgtaattttacactttattaaacattaagtagagtgtaggctttaagtttcttcctcatggttatgaaaattttctaatcaacattagatattttcttgtttagcacctctagctttactatcaaaattattggcatttattttaaagattccgattgattcctcacttcaggttttacagacatttcaccagaggaattgaggcttgaataccataacttcttaaccagcaataacttacagagttatgtaagtttgtttcctattaatctactgcaataacagatgagctcttaattactgctttctttatcgtggcttgtgttttggcaaaaccgatgaggtctatgatcttttttcaggagtaggctatttttcttttctatattattttcattgaatttggttggttattaaaatgataatatatttttactttaataattaggaatattactatttttattataaattacccaacagtcaatcccagaaatgaaacccttttatcatttgacagatatttattgaacatctgttaggtaccaatccagtgatgaatgctagaaaaacaaagttaaataagatacagtctgtaatacagattaacatcctcatatatcaaatatcaaaaaaaattaaaaatcttgactagaataagttgagtacctgaaggaagcagtttaaatgctgtatttttctgtttctacagtcatgatcatgcatttcaactagtacatgtattcaccgcccatccaaatataactaactacgtgctgccaggtacttgtgatactaaccagatgatacaaggagttgaacgggagagggaactggagctggcatatctttgacaaataggccaagtcaatgcaaattttgcaagtcatgggccataaaactgttacataaaccttttgtgattttggcaaagaagtatgtgaagtttttattgaagaaactaacttaaacatacaatattgaactgttatttttctgtcttccgttttcagctaaattctgtccaacgtttaataaatcaatggaggaacagggtaaatgaactgaaaagtctaaatatatcaactaaagtagctttggtgagtatgggagagttttcttgagggaagtgtcttacctattgcttttttgcagaggatattttactttagatttggaaagcaaaacaaaaattttctatcaagaattatgatacacacattcccaaaatagcatcacttaagagtcagggtcttgaaatagttttctctgtgttccttggtcagaaaagcagaaatagttatgctttttaaaagctttttagggtaaagtttttaactttggtagtgctagttttgaaaatggcaaactattacataagtttaagtatttaaggttatctgtatgtaaaaagaaattactttgaacagttatatgaatgcacatttagaatgtaatgtatcgttttgcgactgaagaacacagtatgttccttgtcttaaacagaaatgcctttggaagatatatacccacctgtctccaaagatctatggtcccgactgtggcaagttcattatctttgtaaataaagttatgatgtttctacacccattaaaaagttcttaagaattttattttaaaataagatattcacatttataattttaatatttccaatttctcagatggtttctactctgtataaggatatgagagtaatgtctccctacacttagtgaatggttgacagtcccaacaccccacccctttcttaaatatgtgcttcctgaataactagactcttgtgcaagctaatttctttcatcttttagttcttgtaatgctatttgaatttagtgggacctcttggaagtagtctgtccttgtgtgagaggtggcccaccatcaccatggatgagagctgatggagaaaggataactgagtccaaagaactgtggaacttccctcagggctggaaggtccctgctccttgctaactgcccagggccccttccataggttagaatgtgggacaacccacccatagctgacttaacatgtatcaggagttcatgccttctttatactgaatggtaacccattgtatggatataatttgtttatcatctgcctgttaatgaatattacactgagggagagaaaccagaccaaaaaaaaaaaaatagtgtagaccatgtgattccatttgtatgaaactctggaaaagacaagtctcatttgtagtgatagaaagcagacagagtggttgccagggaccaggagcaagaatgcttttgagggctgggtgcagtggctcacgcctgtaatcccagcacttcgggaggctgaggcaggcggatcacaaggtcaggagtttaagaccagcctgaccaacatggtgaaacccggtctctactaaaaatacaaaaattagccaggcatggtggcacacgcctgtaatcctaactactcaggaggctgaggcaggagaatcacttgaacccaggagaggttgcagtctcaaaaacaaaagcattctttttttttttttttttttttttttgaggcagagtctcactctgtcacccaggctggagtgcagtggtgccatctcagctcactgcaagctccgcctcccgggttcacgccattctcctgcctcagtctcccgaatagctgggactacaggcacccaccaccacgcccagcttttttgtatttttagtagagacgggatttcaccatgttagccaggatggtctcgatcttctgacctcatgatccgcccgcctcagcctcccaaagtgctgggattacaggcgtgagccaccacaccggccaaagaatgcttttgaggcttccaaatgaaagaaatcgcttatgtttgctttggatgattaagaaagtcttcttgaaaggaaggagcaaatacaaagttccttgaaagtaggattaagatttcagtaagcagagatgaaagacatttctagagcacagaacagcaagaacataaagtactttcagggaatgggaaatgtttaatggatttttagtcataagcttttaattatataatagtggatctacttcgagtattagactgggtattctataaaggtcctttttacctaatatctagatttcttgataaatgcagatctacccttatagacactgaaaaaaatttaaaaatatttttctgattataatatctgctcattgtagaaatttagaaagtataaaaaagcataaataaaatttaaatcacctgtaatttatcagccagagataatcactgttaacttactaatgtacattttttatgcatattcatattactagttgtgattatactgtttatacagtattatgtcttatccttttcaacatcatattatgggcattttccatgttaagcatttaactttgccttttttaatgcacttttttcttctcttttctttttttgagtcagagtcttactttgtcatccaggctttcccaggctcaagtgatcctcccacctcaggctcccaaatagctgggaccactggctaattttttatagagatgggggtctcgctgtgttgctgaggctggtcccagactcataggctcaagcccttcaccctcctcagcctcccaaagtgctaggattacaggtgtgagccaccacacccagcctttaatgcacattttaaaaacttgaatttgtccataaagtgtatagaaaagatactggagcactattcatcaagcactttattatttgcacacttttttttttcagctctctgatgtaaaggatggagtaaatcaagcagcacctgcatttggatttggcagcagtcaagcagcaacatttatgtcgccaggtaagtgataaagtaatgcaggacttcactgatttagaaaaattagattttataggtttcaaattacaagcctgaatcgccattttaaattaccttcgtaaattctacaaccttccatcatagagcctcaaagcatttgactcattagacatttgtgaaagggaggccagattgggcatgttctttgaaagacacttaagctttagaagtacattttaggaatgagttttcaggagtttcgtagaagtacatagctatgatagcagcacctttgagaactttcttgtcactgtgtataacagcatagcattgtcctcaggtagcagctctggtgaggtaagtagaaaccaaagtgaaagtctattccctagtccctgtggtttctccttgggtgaaggtcgatcaaggtgaaaatgggattgttagcagaaaagacaggcagcaggctttagtgggtagttctagcctctcatttttactttcctcatctcgtccgtccagtaagcttctcaacactgaaacatgacataaataagaaaaaaagatagggggaggaaataattgtgacatttttctgaccgtaatagatttttgttgttttttttgttgttgttgttgtttgtaggctttccagtcaataacagcagcagtgataatgctcagaactttagttttaaaacaaactctggatttgctgctgcctcttctggaagccctgctggttttgggagttccccagcatttggagctgcagcctctaccagttcaggtatctctacttctgctccagcttttggatttgggaagcctgaagtcacatcggctgcatcattttcattcaaaagccctgcagcttccagttttggatcacctggattttcaggacttccagcttccttggcaacaggtcctgtcagagctccagtggccccagcctttggaggtggcagttctgtggctggttttggtagtccgggctcacattctcacactgctttttctaagccatccagtgacacttttggaaatagcagcatatccacttctctgtcagcctcaagcagcatcattgcaacagataatgtgttattcacacccagagataaactaacagtagaagaactggaacaatttcaatccaagaaatttactctgggaaaaattccattaaagcctccacctctggaacttctaaatgtttaaaagggcaattttaaatacaaaaaagaatgatgtttaaaattgctttgagtgattcatacagagatgtatatatgcatacatgtatatattcataaggaatataagcttccatcaatagtgattttaaatttgatttttttcttaactctaaatatttaagtaaaaagtaacaaaaactctgcaagcaagggaatttttttgtactgtaattttgaatggaactgaaaaattatgcacgaataaagtacttttctcatgccataccactttactgtctcacaatttaaagttttaaacttttttttttaggaaggagataatttctgtaattattagggggaacatgctcaaatatttaacctacttttagagtaaacattagtagcatgacttcatgttcaggattctctcaaagagataaatcagtttgtaaagagtgacaagcttttagttttagaaccataggggcatttcccccccgataagtttggttccctctcaactttggcggtctcgtggaccaccatttgagttttcttcaacaatcttaggctgctttttattttggcctcacttttatagaattctatttattcatcacattagtctgtcaaatggatgagttgtaagagaaacaaattgtgatctcatgtgaataaataatgtgtgtagtggggtcaggattcaccagtttctgtttctagatcttctcaggcatggccaggtacagtagctcacacctgtaatcccagcactttgggaggctgaagcgggcagatcacttgaggtcaggagagttcgagaccagcctggccaacatggtgaaaccctatctctactaaaaatacaaaaaataagctgggtgtggtggcgggcacctgtaatcccagctactcaggtggctgaggcaggagaatcacttgaacccgggaggcagaggttgcagtgagctgagatcacaccactgccctccagcctgggtgacagagcgatactccatcccctttcctgccctcccccaacaaaaaaagaattattgtgcatgtttggatctccctgtgtcctcagattgagggagtaagatttatattttacatatggatgatccaagaaactaaatgcctgtcacgagttgaagcaggtatatcagacttctgcgctttctcagtcctcaaaaattgcatagctagcactgccagagcagttactaacacggttctggcattcagctgatttttctaagtgaatataaaaccttacataataaaagatatgccctccaaatgattttaacgtatgcaaaggattcagtcctcaaaagacctgcattctccattacacttttgttgttgttcttgttgttgttgttgttattgttgttgagacggagtctcactctgtcgcccaggctggagtgcagtggcgcgatctcggctcactgcaagctccgcctcctgggttcacgccattctcctgcctcagcctcctgagtagctgggaccacaggcgcccaccaccacgcccggctaatttttttgtatttttagtagagacggggtttcaccatgttagccaggatggtcttgatctcctgacctcatgatccgcttgcctcagcctcccagatttctgggattacaggcatgagccaccatgcctggctccattacactttttgaggagctgcatgactcatctgacagttctggaaccccagtgtttggtacagaatctatactataaccaggggatatatatttgaaaccatgctggtgtagagatggtaaatagagcataagttcctttagaaggagcaagattaaaacaaaaagagcataaattccttctttggtctcaagctctacagactttccagtattcgaactaatacttgaatcctagaattttcctgccccgccccccccccccccgggatgacccctacactacctctaaattgcatacaagctccctgaggtctcagttgaacttcccagtgtcctggaagatctcagaaaatcctagttaaaagcccattgtttccaactgtgcctgattataggaatcacctggggtgttaaataatatatccagataacatatccaaattacaggagctgcccattgggatgggcttgggaatatgtcaacaggtattccttgtggtccttcaggcaagtttgggaaacaggactatccagctggatttaggctacttagtaatacctgatttgggagttttaattgttgaagtctgttttctgtgctcccatatagacaaaaatgtgggaatttaacaggatccgaagttttttaaaaagcacaaataagtgctacaggctactaaaaaattttgagaaactaaagcagagaggcccacaaagtagaaactagcaccatgcatacatactggtgtcagaagtcaagaaaactggtaactcccagacctaggctaaggggcatcgcggcttcagaaaatcagaaacaggtaacaatgaggtggcagcagctgggtataaaggtaggttgagtgttcagaccccaagagggaggtagtagaagggaaaaggcacccacaacaaaaggatgtgccagcatcttctggatggtatctcctaatctcatatccagtgagactagcagagctggactaactaagaggcataccctaaaataggcaaaaatagcctgccttcacagctgctgtaatagctgtccttttcacctaaggtctagagcaagtgacagaattgtagataaggtatagcaaataaactgatttaactcgattgattatctgatcacagattagaaggggagaatggtaacagctgagagctgattaaaaggggagagaaagtgagctgatattaaaactaaaaggtataaaatgatttagctatgcagtattattcatgagtaaaataattcaacttgaagcatcaaacaatgatttaattgtggtagatacatacattggaatactaaacagcctttctaaatgacttaatagagaataacttggaaatgttttcattctgcaatcagtggacgagagtttgctataaaaagagcatgtacagtgtgatccaatttggagagaaagaatatattaatgggggggaggctaaaacttaacaataatagctcaaattttagtgagtttttgctatgtgccagacaatgtcctaagcattctgtatctagtatattagcaaattgcctcatcacaaccatataacctaggtgctattataacaattctcattttcaaaatgagaagagcaagatttggagacattaaatgacctatccaaagtcactcaacttccaagtagttgagttgtaattcaaacactgaatttaaaggggccatgctttaaaccactctgctataccacatactagattatgaggacactttgtcttttttttttgtattttctacaatagcattacctttatatgtttcccccatttttcctcatatgagtacaatttgcagtcccaccccaaacttactgaatcagtctgtattttaacaagacccaccaaatgatttgtatgcacatgaacatgtcagaaactatttcatgtgtaaaggagatgtacaaaaatgtacacagtattgtttatatagcaaaacagaaagcaccagaagtccatccacgggataatggataaactttggcataatggaatataactgtataatgactcaagttacttgtataaacaaccaccaaaaagggggaaggtacagaatagtatgtatgatataccatttaaagtacaaaagagcaaaacaatactgtagtattatgtatggattcataaacacaggaataatagcatgtggataataagcactgatatgagttggctgtgtccccacccaaaatctcatcttgaattgtaataatccccatgtgtcaagggcaggaccacgtggagacaattgaatcatggagctggtttccctcattctgttcccacgatagtgagttctcatgagatctgatggtttaggggcttccccctttcctgggctcttattctctctgctgccgccatgtgaagaaggatgtgtttgcgtctccttctgccatgattgttaagttttctgaggcctccccagccatgcaaaactgtgagtcaattaaacctcttttctttataaatcacccagtctttattagcagtgtgagaatggactaatacaagcaccaaattcagaacagtgtttacctagggaaagaaaaaaagaaatgggatctgaaaggcacagacagggagctttatatgtgacttaaaaaaaaaaaaaagcttaatatgagaagcataaaatttgacagagctgggcatgatggcacaaacctgtagtcccagctacttgggaggctgaggcaggaggatcattttggcccaggaggtcaaggctgcagtgagccatgatcacaccactgcactccagcctgcatgacagagtgagtcgctgtctcaaaaaaaaatttttttttaattgacactgggtgatgagtagtacatagtaatacgctgttgttttctatactttcccacatgcttgaaataagtctgcaaacttttaaatatttgatttagggggaaaatgcctttttccccaccctaaattgtgtattatcaagtcactttcagatttctgcagtgatcactgtgaatccactggtttgccaaatggtgtccaagcctgttggattaaatatgtcatgctgatgaggcttgtcattcaaacactgaagcacaggagtaaaactagagaactgactgtagaggtggaaaatgtaatttttgctatcagactaacgaaatataaaaggtacacatttgtggaacaaaataaaaatctttgattcactagttgtgtgtttgtttctctaattacactggacgaggaaaataatctagaatcaacatattaagtagttaccttgaggctcttttctcaaccacacatcatcaaccacctggaaatctgttcctttttcctggttatttacaatgcaagcagcttttagccctggcagcacagaagcagaagaattgaggaattctctgccactcctgtagtatcctttaacaggttaagtggttgtcaagcttcttttttaaatttgtaaacctatttgaatcaatttgtgactcctgcattccggcccggcagaaagagctcgaagagacgcagagcgcggcgcgctcccccacggccctccaggccggcgggtgagatggggagatgagctagggggccccggactggctgcgccctctgccctgcagacacggggggccccgctgtggctgcccactggccgggcgcaggcctcgaagccgcggcgaacctctcttccccaccccacctcggtgactgttggcggcggctctccctgcccagaccccgccgccggatcctgcccggcctcgacgaaaccccgccgagccgccgagacgcagtgtctccgggtggcggcgggagaggcgggccgggaagcatggcggccgccccaacaccgcgcggcggagaccgttagggtgtgcagggcccgggaaggcggtctcgcgacgcaggcaagctcggccgcctctttaggccacggagccgcgcgagtccgggcccgggtgaccgctctgttcccactggacgagacctgccgagtcctcaggacaacggacaaaggccttaacgggcttgggaggtgagcgaagtcccgaacgatgacgggtggaacagttagcggccttcgggcggttggtctcgttctaccagagcttgctgtcggaagagagaaatggtggaatgacaagccacgtctggcctcttggaaatgcccaccaccctttgggaagatttactggccgtttatggaaggcctgtgtatttaatatgaaacagctgctctcaacactacccaaaccttttaatagaaaacatttgccacatctagcccttctatgagctagatggaaagaggttgctgatgtatgataaagttagaaaatcacacatcttgtaaattctcatttgcttaaaagaaatcatagaaaataaatgtcttctggagacgacttttggaaatggagttgttaacacggcctctggaagcgagacgtccacgtttgttaagtggtttagaggacatggagctggaagacctgagaaggaagagaagaagcttctgtgccagactggtcatatttagaagacattttcatattctctccattgttttgtgtgcatttcattcctcactactgtgtatatggttgacaatgctaagcttttttgaaatgtctattctttttagatattctgaagtgcctgatatatgtagaaaaaaataaccttttgtaaatatctttttgttacaattcatatgaaatgtttggtgggggaatggcccaatcacctgttgagtaatactcattgtgtttgtgcactggttcaggggaggagggggaagtgcagagatctctatgccactgtgcttacagcgaggcaagattaatcattatctctgcgcattttgttttacttgtctgtgtatatagtgtacataaaggacagacaagtcctgatttacaacatctagtctttctagatattaaagaggttgccagtacatgataaaagtagagttagtaaactaatatattttgtacattttgttttagaagtcctaggaaagattgtcttctgaaaatttgagcattcttgcccgctgggttgatggagatgggaagggttctaggccagaatgttcctatttggaagactctttcaaattataactgttgtcacatgtttgcagtttattcaagactgctgtgttcgtagtggacaaatgaactccttacttgaaacatctagtctatctagatgtttagaagtgcccaatgtatgttaaatgtagaggtagtaaaataccacttcgtaaatatctttttgctaaaattcatggggaatgctgtcttttggaaattgaattgtgaagccacctttgtgagcagtatagtactgtctatacttgttcagtggtttagaggagatgggagggaagacattgcaaaagataatatgccagtgtgttcatacttggacattttcagacaccattttttgcatgttttgtgcatgttgttttgctctgtatatagtgtataaaacggacaaatgagtcctaattttgcaacatctagtgtctagatgttaaagaggttgccagtgtatgacaaagtatttagtacaattagcatattttgtaaaaaaaaatttgtgactctttatgactcatacctctcctccacaaaaaaaaaaagaagacattacttgaattatctattatttcagaagtttctcaactcagagacatttacataattcggtggattcagcatatagtccggtataaggaaaaggttgcttgattggttagattgttattcctcaatattaaggacccatcaaatgctacacttaaggattcagtcctaacacctaccctgtaggtttggaatcaggctctgaaggatcacgggaagttccaggcaaatgatcaacgctcaagcaaaagagggagaggaaaagaatagaaacattgcatacaaatccaaatggtgacaggtgcaaagaccaagaaaggagtgcattaaaatgctagagagtagagtgaatgcagtcactaggggctacagcctgtgataacttcccagaggaaatggatttgagtagttttgagagggaagtgaaatcataacgggaaggagaaatagccaaaatagaagtcaccttctcatagagacaaaatgagcctgtggagattacattaaccttagatagcgtttgaaaatattctttaaagaatatttactaccttgctgaaattaggttaacttttctaagtatcacctgtagaatatgtaatacccaccatctggtgattttgtgaatagtaaatgaaaaaatgaactctaaatgcttagcagagaaattatgctcaattctatcattgagaaaaataatgcttattcactatagaggattccagtcacatagaaatacataaaatgggtcaggtgtggtggctcatgcctgtaagcccagccctttgggacaccgaggtgggaggatcgccttagtttaggagttcaagaccagcctcggcgacatggtgaaactccatctctacaagaaatacaaaaaatcagccgagaatggtggtgtgtgcctgtagtcccagctatttgagaggttaaggtgggaggatcgcccgaaccaagaagccagcagttgcagtaagccaagatcataccactgcactccagcctgggtggcagagtgagactcccgtctttttaaaaataataataatacaaaattaaaatgatattctaccttcccaataacagtctttaatgttttgcacacatttctccaatgtttatacagtctcataattatcaatgttatactatttgcatcttctcaaagaactttctctgtcagcacaaatagattaatgtgcctgtttgtttgtttgagactcacactgtcaccaggctggagtgcagtggcacgatctcagctcactgcaacctccgcctccaagttcaagctcttctgcctcagcctcccgagtagctgggactacaggcacaagccatcatgaccagctaatttttgtattcttagtagagacggggtttcaccatgttggccaggatggtcttgatctcttgacctcgtgatccacccacctcggcttcccaaagtgctggaattacaggcatgagccaccgtgcctagctaacacgcctgtttttaaaggccgtgtagtattccattatatttccattgtttaattgatttaaccatgcccctagttctgagccaataatgcttcaatagaactttctagaaaatatatctttgcacaatgcaggaatgtttcgtaagtgaaaatgttgagttggaaagtatgaacaattttaattgtaatatatttgttaaattgctccctgcccccatcctctccacagtgtacattctgaaaacagaaaaagcctctcacatttcaaaggggagcaagtaatgagtttgctgtaattgaatacatacagcaataagagccatggggatggggggtttgatcagcaatgttttcataagtcccttgcagggagccccctggaccagcattgcatggacattgctttgggtcttctgggcttttttttcccccatcaaaaccagagaaaatgtccaggcacatggcccatacctgtaatcccagcactttgggaggccaaggcaggtggatcaaatgaggtcaggagttcgagaccagcctggccaacatggcgaaaccccatctccactaaaaatacaaaaattaggcaggcatggtggtgggctcctgcaatctcagctacttgggaggctgaggcaggagaattgcttgaacccaggaggcagaggttgcagtgagccgagattgcaccactgcactccagcctgggtaacagagcgagactccatctaacaaacaaacaacaacaacaacaacaaagatttggagggaaaggactttcagctgctctgaagatgcatcaggcattgatcggctctgcagactagtttttacaatatctaatggtaccgaatgtatgagcctgtcattcaccccagagatgaatctcgacaaaacaaaaggaaaaaaaatttttacttctagaaagtaacaccttacacagctcactggtccccagagaagtggacagaggtgactctaatacaactccagctttctaactagccaagcagcttctaaaaagccaaacctgagaccaaaatgggtataagctgcaacagggagaggaaaactcaaataggggaagagagaaccatccccacatgatttcgccacctcctggccttgcatatttctttagccaagattgcacggcccatggctataatcattcttttgaaaatgtgttaacttcaactcctctgtctcctcttcctccaagcacttggctggccaacctgtgctcctgggaggctgtctcctctgcccagcccacctgtggggtggagggctgcagaggaaagtgccctgtgaggttgctgcctgccacctcagtgaccctgggctgcagtccacgtggcacctccagtgggctcagcacctgttcccacagcagcaagtccataccttcaccactgtcttctcatctgtcctctctctgaggaatagcccacctcctgcttcacagagaaaacagaaggcatcacagaggacactggtcactgtcacctgcactccaaggccagccctccacacatgctgggtggcactcacaatcaacaccctcttctcctgcattccctggtctccctcttcacccagtcatggaaggacacatgacccaagctgggccagaaagcatcctctctgggacttcctctattgtccccagcattcattggtcccagctacttgggaggctgaggcaggagaatggcgtgaacccgagaggcagagcttgcagtgagccaagatcgcgccactgcactccagcctgggcgacagagcgagacttcgtctcaaaataaatagagagagagagagagagagagggagggagggagggaaaaagaaagaaagaaagaaagaaagaaaagaaaagaaaaagagagaggatagctctctctcttcatagcctcttctcccttcccatttgaaatccccctcccaagaggtcatcgctgtgaagtctggtgggcattcatcccttttcctcgcagcacgctcagactgcacgggcagtctgcagttaactgtccatcaccagtacccactctgcgggctcccaggtgagacgccggaactacatttcccagagtccctatcatcccatggttccggattcaagttggcctgcaaaaggttcctgctcaatatctgcaagaaggaaggagagatgccattctcctctggaggctgctccctctaggcatgtgggagacatgaggttccagcggcccgccacaaccttgtgtgaggtggagcacggaccctccctttttttagaggcctgtggaccgtaagcatggaaataaatcttaagttccttcaggggaaattccaggcgcctagctagccctgagaagtaaataaataacttgttaaacaagaaggtgatagtagcctaaaacaacagctaaagaagttggagtcccagagatgtttgctttccctatagaaattaaagatagtatcttcacgtatgtccctgagttgtctttcagaggcttggaccccctaactgaggaccccccaaactgatcaggggcatggcaggtagaccccagataagggggaaatgaagactaaactttattgtcctttgttctaagttttttcctgaagggcttggagaaagtcactccccctaaccagttaactctactggctttacatttttaaacaaagtttctcttccttagccaattgcaaaccagaagatgtttaaatctacctatgacatgtaagcccctagcttcaatatatctcacccttttcggccaaaatcaatgtggagcctccatgtattgatttatgatttgcctgtagcttctgttttcctgacatttacccctgcccttaaaaaccttacctgcaagccatcaaggagttagagacttaagcataagctgacgatttcccttgcttggcaccctgcagtaaatgccttcttttctatcactgcaaaaacctcagtgtgagtatctggttttactgcactggaggagcaggccccagttcacttctataacctgtgtgaacctctcacattggtccttcaggctgaggtcaccagcagcagcttccctgacctccactctttcagcctttccaataactccctacagtaaaagtctcctaaatggaatacacagaggctcttctgatatcctgatccaaccgtgatacagagatctaccttgctcgttttaacagctgaatagtatcccagtgcctaactgtcttataatgaatttaacttctcccttaatgatggacacttgggtttttctagcaatttactaacacaattaatgtcaggatgaactttctttcttgcacacacatacacacatacaagttctttatttgccaccctcaagcacatgactgctgaattgtgctttaaagaactttccatcacaccacgaacatgtcacattgttaggttcgtgtgatcactatgaggaagaggagggggaggggaccatggaggccgtaatgtctagactctttcttccctgtcttcagttcaccaaatgtagttcaactgtggacaaaggggctctttgaagcgtcctctaaatgtttaaaattttgtttttagagataggatcttgttttgttgcccaagctggtcttgaactcctagcatcaagcattcctcccatttcatcctcccaaagtgctgagattacaggcatgagccaccacaccaggcctatatttatttatttattagttttttgaaatacagtctctgtcacccaggctggagtacagtggcacaatctcagctcactgcaacctccttctcccaggttcaagccattctcctgcctcaacctcccgagtagctgggactataggtgtatgccaccacgcccggctaatttttgtactcttagtagagaccgagttttgccatgttggccaggctggtcctgaactcctgacctcaagtgatctgcctgccttggcctcctaaagtgctgacattaccggcgtgagggattaccggtgtgagccaccatgccctgcccctaaatttattttttaattgtcaagttgttaccagcagtgaatccatacaggtctgcaacaacctcagttcttgcctcctcagaagaaagaattcgaccaagggggcataaggtagagtgagagaccaaggcaagttttacaacagtagtgaaagtttattaaaaagttttatggcgggaatgaaagaaagtgaagtacacttggaagagggccaagcggacaacttgagagagtcaagtgtgctgtttgacctttgacttggggttttatatgttggtatgcttctgggggttgcatctcttctcccctgatccttcccttaggttgggctgtccgcatgcgtggtggtcggccagcacctgggcggggggaagcatgcgcagtatgtttactgaggttgtacgcatgctcacttgaggcgttcttcccttaccagcgcagtgctaccagaggaagctaaaccagttaaactacgccattttgcctcttagtgggcatgcttgagtccactcacccaactcctgatatcttattcgtaagttgctaatcaccaatttcagatgtttctatttattgggagacaacctttccctggcactgcgaccaattattattttagagagacagcttaacaaccgcttgaccatcacctgatggtcccctgacattcctggtgggggcagggggcctctcctgttcctggggcaggcgcagcactctcttagctctaccctgtagcccctgcttccaccataacagttcacaaagaactggcaaacccttgaaatttccaatttcccttcttttgccattttctgtaggctgctatgattcaagccagagaaagctgccgcctcagcccccacctccatcgccgcgggggtgaggccccagatacctgcctggcttcttcagctctccccttggctcctagctttgtgctgaatggtcctgccttcccacaatgcccttatctcaccaaatcttcaccctgaagccatgaattagagcttctagctgactaaatgcagtatctctcagaaatctgtcatgtgtcctttctgcttctcgtgcccaattaactaattagcatcattttacaaacttctctgggctagccctagagctcagctctaacaccacccaggtctccaggtaaagcctggctatacctcctatccttgttttgttgctgataaataagctttttattgatcttgcagaaaaattatttttctaatttttttctcttttgcctttctatcttgagttgtgccatgacaaaacaccaccaaccccattttccaaaccttacatagaggttctcttcccccttctccctgtgtgcccagcatggtgtgaaaacacagcctgaaaatattctctccagcttcttctgtcaggttccccacccttctccatcagcattcttaacgccacagggattccttccagcccactttggagtacagtttccctcaggccacaacatttactgttattttatgaataaaactttattttactggcggttggtaaactgaacgaacaagtactatttataaaataaatacagaacatgatacaacagccagcattttttctttttttctttttttttttttttttttttgagatggagtttcactcttgttgcccaggctggagtgcaatggcgcgatctcggctcactgcaacctccgcctcctgggttcaagcgattctcctgcctcagcctcccaagtagctgggattacaggcatgtgccaccacgcccggctaattttttgtatttttggtagagacagggtttccccacgttggtcaggctggtctcgaactgccgacctcaggtgaccacccgcctcggcctcccaaagtgctgggattacagtcatgagccactgcgcccggcctactgccagctttgtttctaaagggcattacaaacattgccctactggtgttagtaaacatacttgttttaaaggctcaattttatcagaagaaacctagaaacagaaactggaatggtgtaaaaggctctaccctatgattatttggttttcccaaacctaatttttttttgtagatctacatacattagctattctttattctttgaaaatagcactttaacttagcgtaactacctaatccccatttactcatgagattttagaagagaggagttcagaaggaaaagttattcaacttaaaacaaaatctctaagtaaatgatgcttgaagcagatgaaaaaccagctgacctacttccattacttaattaagaaggtggaatcaatatacaagtgtttgctaattttattcatttttttggtcagttacgtttatgatattcagtgatgtctgtttacagtaatgtatgtgtgtatatatatatacacagtgaggcagtgaggcagaatccacctgctagattaattgcattgtgtttgggtatcagaaaaggccatggagcatttatctgtccagtggccagtgagttgatttgggtttgttttgcttttaaaaaagaggaagagggtggtagtgatctcctctccaagagccctaagcagctgacttcagggtgtcacggggtcttgccggcctggaagcatttcaacaccaggctcaggtccctgcagagcaaatcccatgactccagtcactgttgtgccagaattctgttgtgggcaattcagtttaagtgagcaagtcttgaaacatctttttatgttatagggattttatgggaagagaggcttaattctgcaggatttgatttattttagtattaataatttttgattattttttctagaaaaggtgtgagatgacttatgaaaatatatacaggctgggtgtggtggttcacgcctataatcccagcactttgggaggtcaaggtaggcggatcacttgagctcaagagtttgagaccagcctgggcaacataatagctgggcatggcagtgtgcgcctgtagtcccagctactcacgaggctgaggtgggaggatcacttgagcccaggaggtggaggttgcagtgagccaatatcataccactgccctccagccttggtgacagagcaagactatgcaaaaaaaaaaaagaaaagaaaatatacacaataaaataaaactttagacaagtggatgagaaaacagaggcaaaaggaaaatgaggacaggaaaaagaaaatgaagccacaaaatgtgtgctctgtgggctctatgcttactggcagtgctggcagagttggttcttagcttcctaatagcaagataatgaaggcaacagtgagctctgtggctcacagtgtccctaatttctttctttcttttttttgagacagagttctgctctgtcacccagtcttgagtgtagtgacacgatcttggctcactgcagcctcggcctccgggattcaagtgattcttgtgcctcagccacccagtatctgggactacaggcatgcgccaccgtgcccggctaatttttgtatttttagtagaggcgggggtttcaccatgttgcccagtctggtctcgaactcctggcttcaagttatccacccaccttggcctcccaaagtgctgggattacagccgtgagccaccgtgcccagccgctagtactttttttctgaaaagagaatacaactgctcaggagaaggctaagcattctgtatgctgagatcagagagaaatttctcacgtacatgtaatgccttcaaaaggatcctcagtgaattcctttggatggaccacagtgacttcccagggctatttcatatgatgtccttttgcagaatagggcgcttcaggccaaagtgagcatgggaaatcagttctacagggagccaagatgatgccctttggggacccatctcagcttgttagctgagtgggttttggagggcctgatgggtggtcagacctattatcactgagcaagctctgcagcatcagtgagttcaggaaagcatattaataactgctgggctttggtgctgtgtgcttaaaggtgctgagcgagaggcagggttaggactggctgcatgaattgtgagatccagggcaaaatgaaaatacagggttccttgttcaaaaattaggaatatcaagatggtgacaacagagcattaaaccaaccgaagctcgtttctaagagtggggccctgtgggactgcacaagtcacacctctatgttgctggccctaggcaggagatatgtcctcatgaaaagtcaaagaacctggtgaggacacagcctgaagagaaggtcaagccaacctgcattctgctgagccccagactgcaaacaggttcctaaagactatgtctctcaaatcccaaactcgggtgtgggagaaatactactttatttctcataacaagttaatttttggctccacacctcacattacaaggctgacagaaaagtaaatgagtaaacaaacccccaccaccaatcacatcctaaagcccagtaccccctgcagtttttgcataggaagctttattatttgagttattcagggtgcttccccataacaatctcctgcaagaaatattggggagaacagggacagtggcatgtagccccacttggtctaacagagtgttttaatgagagctggaggaggaaggtcagtctctgggtgacaggcagccactggtgggaggatcctgccccattagatgcttctctgccacctcagacccgggtgggcccagctccacctcccaggctagatgtagccaggccccaaagctcaggacgtttacaggaggtctagagcaggaaccaccaaagaatcagaactgttcgttcattcaatgcatgtttattgaatgccagctaggtcaggcactgctcttggggctagggagacagtcaagaataaaacagacccaaatccctgctcttgtggagctcatatactatttatggaagacagtctgtttttaaatgagtcaaccatcttgtatctaggaaaataataagtgctatgttaaaaaataaacatgaaaggaaataggttatactaggtgtggctattgctattaccaataagggtgtcaatgacgatctcactgaaaaggggcatttgggcagaatacgaagaagtcaggaagcgagccaggcaaattcctgggggaatggtggctagtgcacaggccctgaggtcagagagcctggtgggcttgaagcatagcaggagactgtggggaccttgagcagagtggggttggtgctagggggtgaagtcagggagggagcagtggctgcagcagcacttgtggaaggattaagtggcgtattagagatagagaggaatgaaaattggagtttaattttggacacttgatatttgagatgttattatatatccacataagttaaggttaggttacccatatggaaaaaatggacatcgatcagaagttaactctaattgaatcatagacctgcatggaactaaatacagaagctaaaattactattaaaattcttggaagaagacagatgaaagtctttgtgacttggtggaaggcaaggatttcctatatagaacaaataaaagcatggaattttcctactaacttgataaattggactttattaacatttaaaactcttgctcattgaaagataccattacgaaaacagagacgggccagatgcggcggctaacgcctgtaatctttacactttgggaggctgaggtgggtggatcgcctgaggtcgggagttcaagaccagcctggccaacatagtgaaactaaaaatacaaaattagttgggcatggtggcgcacgcctgtaatcccagctactcgggagactgaggtgggagaattgcttgaacccaggagacagaggttgcagtgagccgagatcttaccactgcactccagcctgggtgacagagcgagactccatctcaaaacaaaaaacaaaaacaaaaaaaaaacaagaaaacagacaaaccagaaaatgggagaaaatattcacagcatagaaaactgttacattttcataataagacaagtaacccattgtttttaaatgggccatctatttgaacagacactcacacaaggatgtataaaaatggccaataaacacatgaaaaaatgccaatattatttgtcatcaggtatctgtacttaaaaccacaatgtgataccattacccattgataaaaatcgctaaaattttaaaatttagcagtaccaagtgttgatgaggacgtggaataactagacatctaaccattgcttgtggaaatggtacagctgctttgtaaaagtttggtgtttttgtaaaaagttaaccatgcacctacctccagtaagacccagccattccactaggtatttttccaagagaaatgaaaatatatgttcacacaaagacttgtacacaaatgtttatagcagatttatttgtaatagccaaaatcagggcgagggtgtggacccatcaacaggtgaatagattaataattagatatacccacacaatgcaatactattcagcaatatgaaagagcaaacttctaatacaaacaacaacatgaatcaatctcaaaatgatgctgagtggaagaagccaggcacacaagcatacatatggcacgacttcatttgtgtaaatgaaaaccaatctacagtgacaaaaagatcattttgagaccctgtgcaaagtgacacaaagaatcttttggaggtaatagagatgttttctattttgattgtggttgtggtttcataggtgtgcacaattatcaaaatggattgaatgtatgtttactgtatgtaaaataatccacaatggagtcggtgagaaaaatagccaattctataggccccttcatgacctctcccagacgtgcttttacccttttcactccagaccttttgctaataggctaacagaaccatagacaaaggtctccctttggatccaaaaaggagtagaataagctggacagtgactctcaagtggctggagttttttgttttgttttgagtaaatctaggaacattctactacgagatctgagaaggttgtatcctagcctagaacacagccagaggcaaaagcttgcacgctaatgtcttactgaaatatacaatccaagagaggcaggagtgatagaaaaggagacctgggtcagggaaggagggagaacaaagagcaggggagggactgctgagcttgtcacagcttgcaacaaacgcagcaggttgctccttctcacaggacatctcaagagaggccagagaaacctactgcatttgaaacagtctgttgttggggaggaaaggcgagtcacttatctgctggcttctttccatcttctctcaaaatccccatagggcgtcagcttcccagtactgctccacgttgcggaagccgaagcctctgtcagtgggctgtgcacataggcactccttggtctgtggtggccgagtctgtggccagggctttgccacagtgggaggaatgggagctttcactgagaccactcacgctgggagggaaggtcactagggtcagcaggtctgggaggatgccaggctggtctggtagagttgggtgcctgcagtctgtgcacagaaagctccctatatctgggtaagtgtggagtttccaaaaagggtgatggaacccaagggacactgctgtggtggtgttcccagacccagcaagactgacaagagtaggtgcactaattggaaacaactttaccctcttttgagtgttaccaattctactgggttgaatagtggccccccaaaattcgtcttcacccagaagcctgtgaatgggaccttatttggaaatatgccctttgcagaggtattcaagtcaagatgaggtcaaactggattagggtggcccctaaatccaatgactggtggtgttacaagaagagagaaattttggccaggcacggtggctcacatctgtaatccagcactttgggaggctgaggtgggtggatcacctgagctcaggagtttgagaccaggctggccaacatagtgaaaccccctctctactaaaaatataaaaattagctgtggggctgtgggcattgagtgctcaccggagagggaagaaacagtagcgctaagcatagctctggtttttctggtccacgatggccccaagtgaaagagacatttctgctgatatatttagccaaacattgctcactaaaactacctattcagaaattactcagacaggcattccctgtgatttaagagtccattaattattttgtcttctggaatgagccatccagcctagggcagtgttatggctgaattgtgtctccccagaattcacatattgaagtcctgccctgcagtgccgcaaaatgtgactgggtttgaagataggatctttaaagaagtgattgaggtgaaatgagggcatatgggcaggctgtaacccagggtgattggtgtccttataagaagagactaggacacaggcatgtgtgtacatagcaagaagacggccatctgaaagctaatgaaagaagtctcagagcaaacaaacctgccaacaccttgatctcagacatcagcctccagaactgtgagaagtaaatttctgtgattcagggttcccagtctgtgctactttgttatggcagccctagcaaactagtacaggaagcatcctggtggcaagagatcacttcgttgggagcatcagacatgcctcaggcaggatcagaagttgcacagaggcttagggcttgggagtaaatgatttttagttttcagtttccctgctcaggtctattagcggaaatgaaaacgtctaggatcacttcttagggctcccaaggaccctctcctggagggatttaacaaaacagaacccaggagagaagaggcaagggacagccagggggcatattattccacactcgtggagctcaggaacagtgccacctatggcacttcctattgattgatatttgagaagaagcccaggctgccctttgacctctgtttttggtccagagaaaacggatgcagctaggaagccttgctcagtgtgcagctaaattgaggacacattccaagatgcttattggccagtggccaaggcccctcagccaaaccccacttgccaataaaaggagaccatgacccaagtagtgtgcccagagcaacagctggacaattgtgtctggctgtgaaattcgagtcccaggtcagcactggccaacaggctgctgcacttagatgttatagccagggaggaaccaagtcaaagtactgttacttggtgaggggagcagaagccagagcctgagttactctgagaatgtatccccacagcctcttaccagtggggggactggagaattggtggaatccacccagcctccagacaggaacagcctctatcagagagctgacaatgttccaagtttacccccacccactcacccctaacctctgcaaagagaaggtttgggacaattagtgggtggagagcccagtgaccccccagttttagctaggggtggatcccttcccatagagtatcaggggcaaccaacctcctcccctagaatcctcagagggctgacttcaggaagaaggcagcagggccgggtcagtgatgaggctaatgttgtcatggaaggagagggaagttttctgagcagagaggaccccaccgtgcaaagtgtaggagccagggacagctcctcacaatgtgtatcaggaaaccatctcattgcaactgacctacgactggctcagtgcattccaggagaccacctctcacatagcccagcaggaccaccagctcttctctatcactaaacatgggggcagggtcagccccacccttaaagagtcgggagcttgtggctaaaaggaactgtttgtctctttgcccattttgtcccttcacctcctcctctgtctgctggtgggatgagcatatctttcaggataataatctataggaggtaaccagtattagaaagagagaggtttgttgatgttgaagctactccagtctgaagaatgggaatatctgtgtggtcaccagccttggacacaagggcacagcatgaagccagaactggatgagacagaagatgggggttagaggacgaccgaaggtaagggattacaagcatttgatggacacagactgtctctctatggatttgcctcttctggacagttcatataaatggagtcatacagtgtgggtcacaagatgtgcctagcttctttcatccagagtaatgtgttcttttttgttttttgtttttttgggggtttttttgttttttgttttttgtttttttcgagacggagtctcgctctgtcactcaggttaaagtgcagtggcacgatcttggctcactgcaacctccacctcccaggttcaagtgattcttctgcctcagcctcccaagtagctggggctacaggcgcccgccacaacatttggctaatttttgtatttttagtagagacggagtttctactaaaaacccatgttggccaggctagtctcgaactcctgacctcaggcgatccacccaccttggcctaccaaagtgttgggattacaggcgtgagccaccatgcctgacctcactcagggtaatgttttcaaggtccacccttgaagctcttctttcctttccatgactggaaaatagtccatggtgtggatatgccacattttgtttatctgttcatccgttgatagacatttgggttgtttctaccttttggctattgtgtgtagtgctgctatgaacattcatgtacaagattttgtttaaactcctgttttcaatttatgggggtataggagtggaactgctggggcatgcggtaattttatgtttcacttctttttttctttttttttgagacagagtctcgttctgtcacccattctggagtgcagtggcacaatcctggctcactgcaacctctgcctcccagtttcaagcaattctcctacctcagcctcccgagtagctgggattacaggcatgcaccaccatgcccagctaatttttgtatttttggtagagacagggttttgccacgctggccaggctggtctcaaactcctgacctcaggtgatccacctgccttggcctcacaaagtgctgggattacaggcatgagccaccgtgcccagccatgtttcacttctttaggaaccaccaaactgttttctatggcagcagcaccattttacattcccaccagcaatgtatgaggcttccaatttctctacatcctcaccaacacttgttattttccattttaaaaaattgtagccatcctagtggcatggagtggtatctcagtatctcatggtggttttgatttacatatcccgatgaagagtgatgttgagcatcttttgtgtgctctttggccatttgtatatcttttagaaatgtgtattccagtcacaggtaacgtttgaagggagcattttgattttataccctcagactaaagacaaaaaagaactgtaagcagatatcaaactctattagcaagttggtttttcatacagggttgaaaattctgaaactactttctttatattctagggttaagcaaacaagtgattttgttgttgttgttgttgtttgtttttgttattgtttttgagatagtgtcccactctgtcacccaggctggaatgcagtgttgcgatatcagctcactgcaacctctgcatcctgggttcaagcaattctcatgcctcagccttgcaagtagctgggactacaggcatatctcaccatgcccagctaatttttgtatttttagtagagggctttgccatgttggccaggctggtctcaaattcctggccttaagcaatcctcccgcctcggcctcccaaagtgctggcattacaggcatgaaccaccgcacccagccacgaacaagtattatattgaggataacgagagccaggtttctcacttttgaacagtggatttacaaggatgaaaaggggtaagatttgaatgagtcctgcgatattagattggaattgaaggtattggtgtgaatgcaagattttgaatatagatagaaaaacagaattacatgtggtgcagatacacagacacacacacaaagaaaggacctacaagtaacaacacccagtagccatgaacacacctagcaccaaggtcacaatttctaaatatcacactgcactgagaattagggctctttggggaaatatctgactcttcggctgggccagggaaaatacaagatgagcctggatcatgacaaaaaagtaagggctcagtaagtcttggggccatttcaaaagaatgcaggagctagctcaaagagaccctactggccaaatatagaacaattaaaataaataattacagtataaattttaactcatcaaataagataagaatctatcagtctaaagaacaacaaacttggaggactaacactgtctgatttcaagttgtattataggtagggcccagtggctcatgtctataatcccagcattttgggaggctgaggcgggaggatcgattgtggccaggagttgcagaccagccagggcaacatagcaagaccccatctctacaaaaaatataataatataaattataatataataataaaatacattttaaaataaagatgtattataaacctacagtaatcaagacagtgtagtgttggcaagaagacaaatagctcaatggaacaaaatagactccagaaatagatctatacatgtatggacaattgattttttttttttttgaaacagggtccggctctgttgcccaggctagagtgcaatggtgcaatcttggctcgttgcaaccttcacctcctgggttcaagccaacctcccacctcagcctcccaagtagctgggactacagacacatatcactacacccagctaatttttgtatttttgctaaagacagggtttctccctgttgcccaggttggtctcaaattcctgagctcaagtgatctgcctgcctcagcctcccagagtgctgggattacaggcatgagcaccatgcctggcctgacaactgatttttttactaaggtgtgaagacagtttactgaagaaaggatggtctttccaacaaattgtgctagaacaactggatatttatatgtataaactgaacttcgagctacacctcacattatatataaaatgaactcaaaatcaattatattttaaatagctctgttgaggtataagagacaataagccacacacatttaaagtgtacggttatatccacacccatgaagaatggcattgtcactcagataaggaagactgcaagcaccagtcaagtttcagttgcagagaacagaatccagtcgagctacactaagcagtaggagacatttttgagtataaaatgaattacaagatcattaagagggccaacaatgtagctgctagactcagtatccaggaacaactcttggagacacatcataaaacttgttgccaagggaactgctgtccctgccacaatcagcaagctgcctctgctaaattgggaagccaccactccttccgccagcctcagagctgtaccacttctggtggggttttcactaacaaaacagatgcatatgccttgcctctcttcctcattagatcagttccaaattcaagtctcaggtctgattgtcaaaagctaaatgacagtccaggcatggtggctcacacctgtaatcccagcactttgggaggccgaggcaggtggatcaccaggggtcaggagttcgagaccagtctggtcaacatggtgaaacccccatctctactaaaaatacaaaaattagccgggcatggtggcgggcgcctgtaatcccagctacttgggaggctgaggcaggagaatcacttgaacccgggaggcagaggttgcagtgagcctagacagtgccattacactccagcctaggcgacaagagcgaaactctgtctcaaaaaaaaaaaaaagaaaaaaaaaagctaaatgacatctggaaccctggcatcaaggaagtctggaaaatgtgtgtttttttctggcctctgcaatattgaaaggcattctttttgtttgtttgtttgtttgtttttttgagacagagtctaactctgttgcccaggctggagggcagtggcacgatcttggctcactgcaacctccacctcccgagttcaagcgattctccagcttcagcctcctgaatagttgggattacaggcatgcaccaccacatctggataatttttgtgtttttagtagagacagggtttcactgtgttggccaggctggttttgaacgcctgacctcagatgatctgcccacctcagcctccaaaagtgctgggattacaggcatgagccaccacgctcagctgtggaaggcactcttagagggtggttgggatagatgttgagcgagtcaatccacaatatccatcacagtgtggatggaatcaatttgggagggaaaatcaggagttcagttttgaacactataaatttaagttgtcatttcgatatatgactagagctgagtagtaggcagggaaataaaatgcagtgtaatgtagtggtaagagcacagattctggaaccagtctgcttggtttcatatcatagctacctcatttattagctgtgtgacattgagcaagtatcttaacctccctgtgcctcagttttaccagctgtaaaatgacaataataatgttatttaataaccatttatttcagtatcttcccgagtagtgtcgttatgagaaattaaatgagttaatatttgtaaagcatttaaaacactgcctggcacaaaataaccaatgtatatgtgtttgctatgataataataataataattttaattaataatggtttgtttaattattattattttaattaataacctagcaaatacacatacacaaatgcactgcttattttattgttgttactatgagctcacctaaggagtacatgtagctagagcagagaagagattggagcactgtgacatccagaggtcaaggagatgagaaggaactagcaaggtgactgagcaggagggacaaggagaagttggttcaagaatccaggaaaaaggattgcaaggaaaagggtgaccagcagtgcctgatggtgctcttagtcgaaacaagatgaagcccgagaatggaccatcagatttgacataataagaaggtcatggtgacaagagctgtccaatgggaaggtgggaaagaaaccctgatagcaatggtttcaaaagggaatcagggagagggtgtgaaggcagcaagtgtggccattcttttgaggagctgcactgcaaagaggagcagagaactgggagagtagctgaccagaaagaaaatggaaacctcagtcctacaaccacaggaactgaattctgctaacaccatatgcgtttggaacaagaccctgggatctagaatgaacacagcccacctgacaccttaatcactgcctgtgtgatgctgagcaaaggacccagttgagctgcgctcagacttctaacccatggagattatgagataatgaatttgtgcatttccaagccgctaaatttatggtaatctgttatgtagccccgggtaactaatacaatgactaagtataatgcaatattaaggaattattgttaacatgtaactgttgtaatttggagttacaaaaaatgctctttttttagtgatgcatatgaaagtgctaaggaagtatctgtgatttgtttaaaaataaagataaagaaggccgggcatggtggctcacatctgtaatcccagcactttgggaggcaggcagatcacctgaggtcaggagtttgagaccatgttgggtttcacccaacatggtgaaaccccatctctactaaaaatacaaaaaaaattagctgggtgtggtggcgcaggcctgtagttccaactactcaggaggctgaggcacgagaatcacttgaacctgggagacagaggctacagtgagccaagattgcaccactgcactctaacctggacgacagagcgaggctccatctcaaaataaagaaagaaagaaataagtaggatcaagtgtggtgactcacgcctgtaatctcagcactttgggaggccaaggtgggtggattacctgaggtcaggagttcaaggccagcctggccaacatggtgaaaccccgtctctattaaaaatacaaaaattagccaggtgtggtggcgcacacctgtaatcccagctactcaggaagctgaggcaggagaatcgcttgaacccaggaggcggaggttgcagtgaggcaagatcacaccattgcactccagcctgggtgacagagcgagactctatcaaaaaaaaaaaaaaaaaaaaaaaaaaaagagcgagagagagaaataaagaaagaaaatatgaagaaatatggtaaaatgttaataattattaatccaggtgatggatatacaggaatcattatactgttttatgtcttaaattttcataataaaatgtaaatatatacataatgatgtgtgtgtatgggtgggtgtgtgtgttagagagagaaaaagtgagggcctagtcttaaggcccctttcttctcctcctgctcctcctcctttatgttgtttcctgattgcccttttggtctacctctcttacagggctgtccccttttggcctgctgtctttctgaagattgtaccttctagagcatattttcataatcccctcctaatagaagttgtattgagcctttaatctccagccctgtgtgtcatggaatctggcgtgagctgacccagaaggacagccacctcccctcagtaggtctgggtgagcccctgggggctgaagtgtcattgtacaatggcccttattcacagcagggctgcctttcagggggcctggtgtgctctcctcgtgccaaccccagctgtctttctcaccattctgagctctcctctgccaccttggcccaggccttaatactttctcagaaacccaattccttcggcagaagccacatgttccgctcaggccccatctgacagctgtggcccctggcccagccccatagacgttcagtgttccctttcacaggccctggtgtgttcctgccagaaaagtccacttcctttacgattctctttttcatggtgtcactttttttggccttgtgcatcatgccaattccttgcacacttgatgaaaggattcaggggcagagaacttgaatcaatggggtctttttatttttgaacatcagtaaacagcacaaatcaattcaatgagttcagcccccttggttattttcgtgcttactgcagtctatgcccagcattaaatcccactgaaaatgcctcttgttattgccagctaatgaagaatgtcgctcttttttctaggtttgaacacactccaaaacattggcctgaaagatcagtttaacattggaaagccctgaatgtaaaatctttaactttcccccttaaacagttcattgacattattctaatcattttctttcctctgcgttttactgtactcactggcagtattttgatctgtttgttagtgcaaaatgcagtcatttattttcgagacttaggaagatatgccaaaatctttcccactgattaagttaaagattatgtaattagagattaaaaggtacagttaacctgttgacttgtcatagttgtacttccatcaaagtggccccttttcaccttttttggtcattctcaatatccaggcccagaaaggacagttcacagtatgtttagtggcactagcaaagaacgtagactggctgggtgtggtgatcacccagtgatcacacccttgatcccagaagtttgggagtctaaagtgggaggatctcttaagcccaggagttcgaggccagcctggacaaaaaaattttaaatagtgagaccctgtctctacaaaaagtgagctctgattaatatgccactgaccatttttagtcagaaatgtggaggggcatgttctttttttaaaaaaatgcatatatatatatatatatatatatatatatatatatatatatatatatatatatatatatatatatatatatatatatatatatatatatatatatatatatatatatatatatatatatatattttttttttttttttttttttttttttttttttaagagacagggtcttgctctattgcccaggctggactgcagtggtgcattcatggctcgctgttgcctctacctcctgggctcatgtaatactcccacgtcagcctcccaagtagctgggactataggtgcacaccaccatgtccgactaatttttaaattttctgtaaagatgaggtttccccgtgttacttaggctggtcttgaactcctgggttcaggcagttctcccacctcagcctcccaaagtgctgggattacaggcatgagccactgtgcccagtctatacccattacttgagaaataaaaccacaagaaaaaaaatcctaaaaaacatattcaaaacaaaatctgtatattttcccctgtagtacggagtgcctcattttatttatttattatttatttatttatttacttatttttgagacagagtctcactctgttacccaggctggggcgcagtggcgtgatctcggctcactgcagcctccacctcccaggttcaagctattcccatgcctcagcctcctgagtagctgggactatagacgtgagccaccatacccggcttatttttgtatttttagtagatatggggtttcaccatgttggccatgctggtctcaaactcctgaactcaggtgatccacccaccttggcctcccaaagtgctgggattacaggcgtgagccacctggtgggctgcctcatatttaaggggaaaaaaagacaaaaaaaaaaaccattaaacttttgttcccatttgaaatatcaagacatgaattaagtggtgcagacaggtggcttcaccagatactgctaacatctagtgaggccctctgcacagtgagaaggttcaatggtagattctggaaccagacagcagggattcaaatgccagatccagtacttactagctgtgtgatcttggacaaattacttctctctgtgccctagtctgctcatctataaaatcagaacaattagagtttctaccccacggggttgttgtgagtgtgtagaatgcttcgattactgtccagcatatgaaaagcaatcgtcacagtcatcattatgtcctgggtggatgacaatgactttctggtccagccttcacaacattgccagaatggtcttcctggaagtctgctcctgtcctctctcacattcctgctccctaacacaggatctgcctctccccctaggaggaagtcaccaggtgataaactactttcactcagaaggcaggaatgagcaggaagcctccaggtcacaacaggaaactgagctgctttttcaagatgttcttcaatttttttggggggggtggttattaacctaggtgaggagagttgagttcatttcattcctcagttcaaggcacatgcttgtgattagtcggcataagtcccttcccttgctttatattttatttattctcttttatccactttccttactcctacatccccctaccccaccattctgtttccaagtatttgtgtaaagggagtgttgtggtggtgaatgcctgacttcaagttacacggctgatgaatggagtgttccccacacagtcttaagatctgtgctgccatgaggacctctcatcttctcttctgacatctgcctgtgaccccctggtgtgcatccttacatttcatgctccccttccccaggtgacagacacccaggttgcctccaatcatcctctgcaacgaaccagggaaaagacggatttctcggaagatggtaccaggaaatcttggtactatgtggataaaaatacagctggatccccacctaagttactccatatgaagtgaactctaggtcaggtcgattaaagatcaaaatatagggcgtggtggctcacacctgtaatcagcactttggaaggccgaggcgggtggatcacctgagctcaggagttcgagaccagcctggccaatatagtgaaaccccatctctactaaaaatacaaaaattaactgggcaaggtggcatacacctgtagtcccagcttcttgggaggctgaggcaccagaatcacttgaacctgggaggcggagtttgcagtgagccgagatcatgccactgcactcccacctgggtgacagagcaagactccatcttaaaaaaaaaaaaaaaaaaaaagaccaaaatataaaacaatgagattactagaaggaaatgtaggtgaatgaatatctcagtgacctagggaaagaacctctcaggcaaaacttcagatacatacaattccttgaacatttcttccattcagattggtttttccagttctctctcacctcttggtcagcccttctcaactgctgagagattatcttttgtttaaggataaaaggggaagaaaaccaaaaccttgaaggctgcattttctttaccttcagttttgtgtctgttttttgtttgtttgtttttttctagatttctcctttgcccagaacagaggtcagcaaactatggctgtgaggcaaatccagcccactgcatattttcgtacagcctactaagaaaggcttttacatcttaattggttaagtcagagaaaacaaaataagaataatattttgtgacacattaacattatgtgaaatacaactctcactattcatgtgtttcattggaacacagactgtggatggctgctttctcacaactgcagagttaagtagttatgacagagaccatatggcccacaaagccaaaaatattttctacctggccctttgcagaaaaaaaaaaaatgccaactcctgaactcttgtgtgccccttgaggatggaaatcatatccagtatttgtcttgtttccctgactgctcagcacagggcctggcaggtaatcggtgctatttctaccactttggactactttcagtttcaagtaacagaataccctaccgaaagggttttagttctcacataacaagaactctagagagaaaaccggcactgcttcaatctcggtgacgttgcatcagggacttgggtcaacgccttctccccctgccctaatggtttcaagatggccatagcacccacctccttgggtcatttcctcgtacaacctttgttgaaagacagaacatgcacagcaacatatgcaaataacttgacctagtaaacaagtcaaggaggaaaataatccctggagccccaaagcagacttcccctcatggcattagccaggagtggatcacatgctccctcacactagggtccggaccccttcccttgagaactagagatttccacccaaaactccagcagcatcagggaatgaggaatcaagaaatgtctttggggtcggcaaagagaagtatctgccccaaggctgattaatagggaggctgatttctgacttttgaaagacaacccagaaattagaactattttttatgtgcagaaccaaatttaattccaacctttcttaagacgcgtaactcattttaaaataagataatttcttggtggggcacagtggctcatgtctgtcatcccagcactttgggaggccgaggtgggctgatcacttgagatcaggagttcgataccagcctggcaaacatggcaaaaccccgtctccactaaaaatacaaaagttagtgtgggattacaggcatggtggcacacacctgtaatcccacctactcgagggggatgaggcaggagaatcatttgaacccgtaaggtagaggttgcagtgagattgcaccactgcactccagcctgggcaacagaaaaagataatttcttcaagtgatttcacatggttttcaaaccatagaagcacaaaagttagctaagtagcttttataaattctgggtggcttttttgaatcaaattcaatgttccacagtcaggactcttctgttgctggacagtcacgtggtgcaaggctgtaagttgaagagtgtcccataggccttgtgcagtaaaagctctgctcttcatcataatggttggctcatcaggaccatcagagtgatctcttggcaatagttaagcaatcaaacggagctatagtaatggcttataaccaaagtacacaatcagtgtcaaaaagaaagacagggatgtgaacacacaggttcccaggagacgcggagccagaacttagcatgggatcccagccctggtgagtcagagcccatgagcatgccctggcaggtggcccgtttgattctcccggctcacaggttgcatgctctgcctgtgaccctctgcctacaagactcagcagatgagcaaatgaaggcccaatcaaacaagaactaacaagaaatgcaatataacttttaaaattagaaatctcgaaatgcatcccagcactttgggaggccgaggtaggtagatcacttgagaccaggagtttgagaccagcctggccaacatggtgaaactccatctctactaaaaatacaaaaattagccaggtgtggtggtgggtgcatgtaaaactcaggagactgaggcaggagaatcgcttgaacctgggaggcagaggttacggtgagccgagatcgtggcactgcactccagcctgggcgacagagctgtcgagagaaagaaagaaagagagaaagagaaagaaataaaaagtgccaactttacagagagctctgagatgatggttttttataccttttaaaaatttccttgctttgcttgttacttatcagcatttctcaactttttttcagtctgtgactttggtgggatctgtctccccactctttgcctgtcctgctctgaccatcccatctgacccaggtatgaacacagagtccatccacgcagtcctccccaagaggaacttggaggaagtaggggccatggtaagaaattacagatgtctgtggggcaaataaaatactgtttgcacaaaggcaattgctttggccaatcaagtgcgaagtcctaactttgtagatgtttcctaatgtgagaagactgcgaagaattgctcaaaagagcaacaaaaaacatctaaactttaaaacatcaactactgctatgaaccagaatctatccatatgtccggaaatttaaatatagccaagaggacgctctctgtgtcagtcaaatattgcaccttttgtgacctcttgttacctgctgcccaacacacacacacactcactcaaaaatcttaatagaatttccattttgtggagaacaggtggaaaggaagggagtcaagaatgctgcgtcagcttccagccatagccctttccaccctatctgcaggttcctggaaagaatgatagtgggaagccctgatgctgggccctaaatctaactctgctcagaggttaggctctggaacatcatcctgtttcattttatacaggtgtgcacactctttactgcattgtatttcttttgcctctatttccatatttagcctttagttagaggttctgagcaaaacttccatttcatttgcagtcattccattgtaaagaattagtgaaaatataccatttagctataaatatttgagctttcgaattcacatgattaataaaaggaaggtaagtaaatgtgcaagaaagttattgtccaggcccagtgaactaagaaaactctgaaggtagagggcaagatggaaaacttctagaatgtagcctcttataaaaaaggatctgctataataagaaagagtgtgttattttatatatctttttttaagagtgtgtttttatataggtgagctgaggtatatatctcattacatttatgtgaatattctctatgagagcatgttctaaacatttttcaggattttcccatatagactaaaatcagagaactttgctgctgtttatgtgcatgaaactttaatttgttttataaatttcttgtgagaataggaatagcctccttactgacataaggtctccaagcctcaatcaattcataagaatgtttcagagcctactctatgcctggccctgtagtaagtctgtagatatttctgtttaaatcatatcgtctttaatttaatgaatggaaagttattggaagatgtaatgcactgaaaaggaagtaatatcaggtacgtggtgttcttgtccaaaacacataacctgaatctacatcatacaactccaaaatggggggcactctattaaaaactagcctatgttcttcaaaaatattaatgtcatgaaagacaaagttaggaatgttccagattaaagaagacgaaagagacatgacaacaatatataaagcatgatcctcgattggatcccgaattagagggggaatatagggctgtaaaggatgttattgggataattggcaaaatttggggattagatagtagtattgtattgatgtattgatgttacatttcatgttttgtattgatgttaaatttcatgattttgataactgcactgtacttacattaagagaatgccattgatctctggaaatagcagctgaagaaaataagagtaaaggagtatgatgtctgcaacttatagttcattataaaactagtaagtatatatgcttactacacacacatatgtaaattagatatcgtgcaaatgtggcaaaattttaacattggtaaatctgggtaaaggatacatgatagttcttgtactattcttttttttttttttttcgagacggagtttcactctgtcacccaggctggagggcagcagtgaacctcagcctcccgggctcaagcaattctcctacctcagcctcttgagtagctgggattacaggcacccaccaccatgccaactaatttttgtatttttagtagagacagagttttaccatgttggtcaggctggtctcaaactactgacctcgtgatcctcctgcctcaacctcccaaagtgctgggattacaggcataagccaccactcccggccctcttgtactatttttgtaactcttctgtatgtttgaaattatttcaaaataaaattaaattttataaaattgttggtacatacactaaacttgtcctgaaattagttgccttgtgagattttactcttggctaacacttaaacattatcttgagcaaggcactgatgactaggttgagatcaaaaagttttacaaccaagttttgcaagatttatttctactttgaaaagaaagctggagacggacagtcgggtgtggggagtggtcattaaatcaattatgtgtaatgggaactcggcctctacatttccacttctttattgccactcctgggaaatcggtcagagaaaaaaatacgagatgcacatgcaaacatcttccctgtgatactcactttccataaaaatcaggcacaaccctgtacccttgcccactggagtttgtcaccctcagggctggcaggcctcagcactctcctgggccagggctcccacgccgtttcccactgagagaggcccaagctgtggctcctccagaagccttttgtgtccctccagaactatgccgtccaatacagtagccactggcacatgtggctgcgagctcctgcgatgagctggtctgaactgacatgtgctgtcagtgcaaaacccacactgggtttcaaagactttgcacaaaaaaaaaaaataaaagatctcaataatttcatatagtgattacatattgaaattacgatgttttaaatatattgaattgaataaagtacattatttaaataatttcaactgctgctttttactttttgtttaatgtggctaccaggaaatttcatatcattcacgtttcacttccactacaaaatagtaaaaaaaaaaaaaaaatcatatacgtggttcacattatgtttgtattaagcagacctacccagatgcagatgaaactgcacagcccctttctcacgccctggctgcacgctctgtcatgctctgagagcatctccccctgcttctccagctggctgctgcctcttacagcactacaggctccacaaagccaggagccttgttctccttggtccctcagtttccagcattgtgcctgccatagctgatcaagggtgttgcttagccaatttaactcctcatttaagaactaggccgggcatggtggctcacagctgtaatcccagggctttgggaggctgaggcaggaagattgcttgaggctaggagtttgagaccagcttaggcaagatagtgaggcctcgtctctataaaaaaaagaaaaaattagcaaggcatgttggcctacacctgtagtcccagccgcttgggagacttgagcccaggagctggaggctgcagtgagccatgatcgtgccactgcactccaacctgggcaacagagcgagaccttgtctctaaagcaaaaacgaaataaaccatatatgtatatatgattttatagtaactaagtcaagttatacttcttccataaagacctctctgtatcctccatctctctgcactcctgtagttctgtctttatgacttagtttgactgccacatgatgtttaggattcatttttaaatactccagtagataatgttactgcagaaggtggacaaaacaagcttggccatatattgatgatcactgaagtaggtgaggagtacatggaagttccttatgttagtctatttttgtgtatgtttggaaattcctataataaaaaatgtaaataatgtctcatactatgcctactttgagggttaatgtctcatcttcacaatgagtgcctatgctcctaagattgttgttcatgacttgtagatgatggctactgtagaacagaggacctacatcggtacttgctgaattaaactctatcttaggtgccaaaaattccattgagaaaagctggatttaggtgtaagaataaggatacaaggtgctattctagcttttgtttcctggcctttatcctacggtcaaccccctttttgatttctgctctagcttcttctctcatgggcttatgattaatcttcagtgaatgcctgcagtgcccctgctccagtgttctgcggcatttctggatagcccatagttatcataaaactaagaaccatctgggtgtggtggcgcatgcatctaatgccagctataagggaggctgtagcagaggatcgcttgagcccaggactcccaggagttcaaggccaggctgggcagggtagcaacatcccatctctaagttaattaattaactggaagccaagtttgcattcagatttctatgttggtccctcccttttttcttactccatagatcccattctgcttctctcactatgtctccctgttctatgggtactaaaggtagaaaagaaaagagtacatttgccattgctttcacatctgcacaataagtgttcatgtcttactttccttctatactgtaattcagagaaagtggtctaaaaacaatactaggatgaaatattgtgatcatccacatttttctttttctttctttctttttttttttttttttgatatggagtctcgctttgtttcccaggctggagttcagtggctcaatctcggctcactgcaacctctgcctcccagcttcaagcactcctgcctcagcctcccaagtatctgggattacaggtgcctgccaccacacccagctaatttttgtatttttaatagaaatggagtttcaccatgttggccaggctggtctcaagctcctgaactcagatctgcccaccttggccttccaaagtgctgggattacaagcgtgagccactgcgcccggccatcatccacatttttctatacgtactgctctttgccatttcaaatggagccactaattccatgagaagagtccttttttaaaaaaaatgtttgtagccagcactccaagaagaaaacccctttgcctgcatccagtatcaaattcctccaggtgaaaaaacaggctaaaaacacagtagccattgtcattgcaaaggtgactgaaaaggatgcactaacctttgtgatgttttttgttttttttttttgagacagagtctcactttgtcacccaggctggagtgcagtggctctattgcagcttactgcagccatgacctctgggctccattgattctcccacctcagcctcccgagtagctgggactataggcatccactactatgcctggctaattttctttctttttttttttttttgtagagatgggggtctcactatgttacccaggctggtcttgaactcctgaacttaagcgatcctcccgcctccacctctcaaagtgctggaattacagggatgagccactgcacctggcctgtgattcgctttcttttctttttccaaaaagccagggaaacacattttggtgggagagtaatttgaaagcttagtaaacctggaaacaagggattttgattacccattcatgtagagaatacccagacaggagagtccgaagaactatacacaaagcagaagtctctgagtcattggctaatgcttaaatctgaaatccatgactctgattatgacatgtaaaaacgcccacattgggacagggcagtcacatgagctgtctctctttttgaactgattcctctacctgtagtttgttcttgcctttctgttctgccaaatatcaaagctttgtttcaacaagtctgtaacctgtgagaggtactttccatcactgcttccatcacatgctttctttaaaaatagaatttgttgagctggtgcaatggtgtgcacctgaaatcccagcgacttgagaggctgaagagggggaattgcttgagcccaggagttcgagtccagcctgggcaacatagtgagacctcatctctaaaaataaaaattaaaaaaaattgtttttaccatgtcgtctgctgtataactgtgctagacagaataatggtccccgaagacttccacatcctaacccccaggacctgtaaatgtgttatatggcaaggagcagatgaaggttgctaatccgctggacttaaggcaaggagatgatttcagattatctaggtgggctcagtataatcacaagggtccttgtgagtgggagagggagacgtgggaatcagtgccagagggctgccagagacagaggggccaatgagacaggaaatgtgggcagcccctagaagctggaaaggcaaggaaatcaattctgccctagagccgccctgccaacactgtgatgttagttcagtgaggccatttcacacttcggcttccagaaatgtaagatcataaatttgtgttgttttcagactccaagtttctgaccatgtgttgggagaaaaggatcttaactaatttttatgatcttgcttacaaacaccagtttaaattgagcaattcctaaaattaaagatgttaattcctttttttctttccctgaaaaactaaggaaaaacattttggtaggagagtaatttcaaagcttagtaaatctggagacagttcaaataccagtttaaactgagcagttcctaaaattaaagatgtgaattccttggcagcctgccgggattcctgggtgtgcctgctgcctgccatttcgaaggtctcctttggggtggctgcctcagtcctcacagctcaagcatcgctcctcaagtcgggactgtggccaccaggaggagtgtcagaagccaagagaaggcaatttggggcatttctcaaaagttgactattctggtcgggcgcggtggctcacgcctgtaatcccagcactttgggaggccgagacgggcggatcacgaggtcaggagatcgagaccattctggctaacacggtgaaaccccgtcgctactaaaaatacaaaaaattagccgggcgaggtggtggtcgcctgtagccccagctacgcgggaggctgaggcaggagaatggcgtgaaccctggggggcggagcctgcagtgagccgagatcgcgccactgcactccagcctgggcgacagcgagactccgcctcaaaaaaaaaaaaaaaaaaaaaaaaaaaagttgactattctttgctttcctccacatcatttccgaacagagtaattgtatctgtaattccagataattgagatgtttcccttttcatttctcaattgccttaaggcgagttgattagcaaccttcatccccccagccatataatatatttaccagacctggcaattaggatctgaacggaacaatttttctttcttttcttttttcttttcttttcttttcttgtcttttctttctttctttctttctttctttctttctttctttctttctttctttctctttctttctttcctttctttctctttctttccttccttctttctttcttttctttctttttctttctttctttcttaagagatgaagtctcactacattgcccaggctggactcaaactcctgggcttaagcaatcttcccgcttcagcctctgaagtcactgggacttcaggtacacatcagtacaccagctcaaaaaattatttcaacaaaatatttcaaactttctttacagtataattttatctttccaaaacaaacaaacaggcttgagaatattctttacccaaaatggccctgtctctgagtcctacatagagttaactactttatatattatcaaccattgattatcaagaaacagattatccaacttgtagttctttggaatgaagatctttctcttgttctcttattcacctctgtccagctgcctacattttgactcttgtcctatcagtgcctcttctctttgatggtgcagggaaggaaaaaagacataaaagttgatttgatcattgtgtctccctaaacaaaacgaaggttttgttacagaagaatttaacacttccaatttatttagagacggggtggctaatctggctagaaatatgagccagaactgtgtctgcaacaaaggacaaaaatatctttaaaaatgttaatagtagcttttccttaaattgaaaaggtgtttttttttaattgtaaaagttatgtgtttgtcataaaaagcaaatagtgctgtaggcagctgaggtgggaagatcacttgaggccaggagttcaagaccagcctgggcagcatagtgagatttttgtctctacaaaaaataaaaagcaaataaaaaattagccgagtgtggtggtgtgtgcctgtagtcctacctacttggaaggctgaggtgggaggatcacttgagcctaggagttcaaggctgcaatgagctataatcatgccactgcactccggcctgggcaacagagtgagagcctgtctctaaaaaaaaaaaaaaaaaaagtttttaagtaatttaaaaagcaaataactatatacattattcgctttacattacatgaaactaataagtatttccattattcctttattcatcaatatttgaaaattgtttcagtcatgaataatgtgttcctttcgttgttttccccttcatatttgctgcaaaggctgtaaaaggcactctacagagttgtttgccgccttagggatggaagtcagccactcctgctgtatggattttagtttcataggctatttccattcctccttgacacactgaaccataaatcaataccccaagttttaccctcacctgcaaccaaggtttctactgcactgaaaatggccatgtgaatgtgagtttgagaaaggtcacatatggtaaagttttcatgttgccacattttctgcatactctgtaaccaggaatgatttgactgtataaatttatcttacagacacacttgtttgtacatttaatgcctgctttctataatatgaaaaaatacacagaacgttttatgcaattggctctgagtaatgcaacacataaatgctttgagagcagttaccaaaaattatgcaggttattacaaaagttatatggaattgcacagatattctaaatgtgcttttgagtaaatttctcagctaccagaggcctgggcagctgtttccagcacatcctggcacaacattcatgttatcatccacttatgtattccacaatttcaaatgattgataagacacctcccccatctttgcttcctcttggaggaaaaaaatatacaagcaatcacgagcacaggagcaggtggacaactacatcttaggaaagggtgcgtaactgtgaactctaaacgtgagctgggtgcctgatgcagtataggaaccacagtaagtcgataatcagtgaggctggaggattgaaattttatttggtaaagaatattgagccaggcgcggtggctcatgcctgtaatcccagcactttgggaagccgaggcgggcagatcacaaggtcaggagatcgagaccagcctggccaacatagtgaaacctgcctctactaaaaatacaaaaaattagccgggcatggtggcgggcacctgtaattccagctactcaggaggctgaggcaggagaatggcttgaacctgggaggtggaagttgcagtgagctgagatcgtgccattgcactccagcctgggagacagtgtgagactccatctcaaaaaaaaaaaatgaatattgaaatagagtctataggaaaaaaactccttgaatctagtaaatgtggaatcacaaaattgaaataatgtgcatctgaaaagtgaataaatagatgccaagaaggagtgagtcataagcacatgagttgtaagaggttgaacttgagagaccagatcaggcagtgccgcttaataccatcacatgatcctccccgaggccctgtatttaattaaaatagagagggaggcaccacagatgccagaagaacactgttgctcttggtggacgggcccagaggaattcagagttaaaccttgagtgcctgcgtccgtgagaattcagcatggaatgtctctactatttcctgggatttctgctcctggctgcaagattgccacttgatgccgccaaacgtgagtaacccttaatttctatgtttaacccattctctggccattggctgaaatgatggctaataatatcctctgaactagaggttggactgaagttcttcaggaagctttcatctctggctcactcatctcttcttctgcaaactgttgggaaggctgaaactacagcaaaatgcctccagctccattctttgctttcggctcatggaaagtaaaaactatgctgcccttctcttgtgaagcttcttttccattgcaattgcaacccattcttgccagacagtggttgggggagggttggacagcctccggccacagaacaaagcaactccaccaactaaactatgtccagcttccatccaaaagggtggagacctcacatgaaatggggtctccaatctggaggcaaatttacgaatctccccagccctgaagctattgctcctcctgcggggcttcctcacagacctgcaggagcttgctgggagaggagctgaagcccaggctctctaccctggtcaggcaggagaggccagggcatttttaacaatactgatacccacgcaatgaaaccggaatctttgggagtggggtcagaggatccttgttttaaaagttcctcttgggatctgcctatgcagccagggtccagaccactgaagcagtgtgcagattcgcgagaggaagagagctgagccgctgtaaccctgggcctgggattgcggggacgggacgggtgggaagcggccaaaggcgcagcggcttctggtcagagccgcagaggcctgagacgtgggccgcgccccggcccaggagaccccgcggccgcgccctaaccctcagtctcccgactgcgactgcgacccgggaaaacgcctacgtttttggaaaggaagtcccatcacagggagctgacccggtgtcagcgcgcagcacgttcccggcccgcagtgcgccgcgcgtcctcctagcagcccgcggagcccggcactgtgatggtcccgcttcccacacgaggccacgggccacagagtgggcaaggaactcgccccaagccacacagcgggtaagttgaggaggcagccttccatcccgacctctgtccttcctgcccgggtttggggttggacaggctcgggctccccgccagcctaggggctgggtctccagtggctttgctccatttcctcatttccttcaaaacgaggagttttcgtttcctcatttgcaaaactgggtaattgtgttcttgtgagatcagctgcttggcgtgagagacgtgcatggtggggattgttcctacggaggcagacctgcacccaccctcaggatacctcccaggacaggctactttaaagacgaaggaacacagaatagacccgatgggggacacctgctattattccaccctctttcaccagtccacttcgctctgctcaataaaacagattagcaggaggccgaatcagcgctgtcagctcgagaggagtcctcagcctcttgggcagtgtaacaaaacccagccattcaccaggttcaccttgctctggactaaatattctgcccagaaaaaaataagggcaggcagaatgtagcagtgtatcaagcactaaagatttcctaccattttccattcgtagccctgaaggaaggagaaagtgtggacaaggtaggtggaggcagcccagccaccacctctctgctggtggacacagcaaggatgccaaagtgtggaggcagagtcggctgcagcactgggtgcgacctcaaatttaccttcacattgattgcccccaaaacccacccccacaggcttttatttttcttttaaaatctgcttactattgggtttttttttttttaatcaatttttttagagacagggtcttactctcacccaggctggagtgcagtggtgtgatcacagctcactgcagcctccaactcctgggctaaaggtgatcttccacctcagcctcctgagtagctgggaccacaggcacgtgccaccacacccagataatttttgtattttttgtagaaatgggatcttactacattgcccaggctggcctcaaacttctgggctcagtcctcccttggcctcccagaatgctaggactacaggcatgagccaccttatccggatgggtttattttattttttaaatttttgtagagacagggttttgccatgttgcccaggctggtctggaactcctgggctcaggcaatcgcccaccctcagccttccaaagtgttgggattacaggcatgagccattgcatccggcctttatttttaaattcaactttttattgtgaggtatttatagattcacatactgttgtaagaaataatacagagagatccccatgcaccctttacctggtttgccccagtggtatcatcatgcaaaacaggacatcacagcccagatattgacattgatacagtgaaaacacagcagagctccatcaccaaagtattctcatggctatagatgtatagccaaatctacttccctctttccaaacctcacccagtccctggcaaccactaatctggtttccatttttatcattttgtaatttccaaaattctatacaaatggaattatccagtatgtaaccttttgagatttgctttttttaaaacccaacataatttcctggaactttattgatttattgaagtaactgcatcaatagtttgttcctctttgtcacagagtagtattccatggtatggatgtaccacagtttgcttaaccattcacccattaaaggacatctgggttatttcaatttgggctattatgaataaagctgctataaatattcatgtgcagatctctgtgagaatatcagttttgtttctctgggatgcatgccaaagggtacaatttcttggttgtatgatagttgcatgtttagttttgcaagaaactaacagagtggctgtaccattttacatttccactagtaatgtgtgagcaatccagtttctctacatccttgcaagcatttgatgttgtcactgctttttagttaggtcttactgatagggatatagtgatatttcactactggctaatgatgttgaatatcttcttgtgtgtttatttgccatgagatgaatgaaatggtgaaatatcatttcattaatttttaccaatttttctaattgaatcccgtggttttcttatagtgagttttgaaaattctttatatattctaaatactagtcctttattggaagtgtagtttacaaataatttctcccagtctgtagcttgccttttcatcctctttcatgtcatgtttcagagagcaaaggttttttattttaatgagttccaatttcctgttacgggttgtgttcatgtcaagtctaagaattcttgcctagtcctagatcctgaagatttcacctatgctttttgcttttttacagcaccatatgttgaaaaggctatcttccctccattggcttgtttttgcatctttgtccaaaatcaagccaggcactgtagtgcttgcccgtggtcctagctaatcggaaggctggggcaggtagatcacttgagcccaggagtttgagtccagcctgagcaacatagtgggacccccatctcttcaaaaaaaaaaaaattagtagagcatgcttgtgtgggtctatttctggattctctcttctattccattgacctatgtgcctatcccttgtaactctccttttaagtttatacttttcctgggcttctgacatttaaaatcggaagagaaatctgcgttttgattatgttcctggaaacaataactttctttcaagatctgaggaagaggaagactctctggaacagtggaaagaacttgtccttgtcctgggaatcaaaagatgtgaatcttgatttctactaaagatgaccctaggtgaatcatatcatttccctaggcctgaatttcttcatatataaaatgaagggatttgaactaaataatcttagttcttttcatatgactcaagtgaatttccaattacaaatacttattgataaacacaaatgtcctcccctcacttaatgtctatttccaaataggagcaatctcatagaatcacaggacatttggcttttgtcagatgtgaaggcccagagaagacacatggcctgaggtcacacatcctgtttaataacagaaccaaggctagaaaacatgttccatgactccgactttgctgctctttcccattctctctgcctcctggagaagaagggaacgtgttgctcccttctcctaccagagaagaggaatagaaggaataggtcagagacatgcatccaatatggcttctctgagcacccactcaataccacacctcatggaggatctctcccaggatttaagagaagaacaagacagagtttctctcctccaagagtctatagccaggccaagacatagaaccacagaaattaatgggagaacaatttaagaccattggctgaggaatacagataattgagctttgggctgtaacaaaataggttaagacatttattatcttagtcagtcccgaggtaagcaagactagagcaacagcccaacagtttcattgaaggctccatttcttttcatctttccactctgacacccttaatgtgttagctgtttcctcagatttgtgtcctcatagttaaatatggctgccatagctctgggcatcacatcattacactaccatctccaaaatcaattctgaggaggaaaaaattgagtttgttctcacatatctcttgttataaaggaggaaaacctttctcagaagttcccagaagactgcttctcagctctcactggccaggatcaaatcatctatctgctcctgcccaaattgtaaggaaaactaggaagtgatactctggaattttgaactgttagagtagaaactctgccagcaaggggaaaataggaggaggcgtgcaggcgggaaacagcttcttggaggcaaccaaccagtctgctacaattctcaaaagaaagagaccatgtgaccaccagactggtcaggcaaggcaaaattgcagacactaactcaagattagaaagatttttaaaagaactgtaatattacaaacctagagcaaccactcagaacaaagtaagtgaaagaggtatcactaacaagctagttgtagagataaaatggaatccaaatgtaactccaaagagtacaggaaaagaaggaaaaaagaacaagtggaacaaatagaaaacaaataacaaggtagtacacttaaaatttcatcatattgatcattacattaaatgtgaattatctaaaccctgcaactaaaaggcagagattgccagactggatttttaaacatccaattatatgctttctatgagaaactcacttcaaatataaaaatgcagacaggtttaaaatgtaaggatgagtagaaacatacatcaatctgaacattttttaaagtaaaagaatggaaaaagatataccagttaaacactaagcattcatatcaaagtattctttagaacaagggatattaccagggataaagagcatcaattcttattgagaaaagggtcagttcatcaagaagctgtaacaattctaaatgtatagtatgcacctgacaacaaagcttcaaaatacatacagcaaaaactggaagaagaaacaggcaattggaaaaaccacaatatagttggagatttcaagatttttctctcagtaactcaaataacaagtagaaaatcagtaggaacacagaaaattcaaaaaaacactatcaactagcttgacataaatgacatttaaaaagaaaacactctacccaacaaatgtagactacacaaagtatatggaacattcaccaagacagaccattaaaaagctgtttatcagtaaacttcctggtactagtacgtgtcgcttggaatcttgaaggcattcctgagcctggcattcctttagccaagtgagtagttcagaatgggaaaaaaaaatgcaaaaatctgaagattattggcatcagtgttttcctaataatattgtatcaaatttaaatattcagaggatgtgtattgagaagccaagtgatggctaaaaaatattgactttcaaaatttttctttgattcatttaaagttcataaagacatagggtctgaatgcttgtaatcaaggtatttccaggagacttcctttaaaaaacaaagcaccctctgtttacttgatgcactgaatatattatgtatgtgcttttcaacagtaagaaataaaaagtttctttaaccactgtgaggtgattactaaatgaagaatggaatttgtttcgaatattgatacaggatttcatgatgtgctgggcaatgaaagaccttctgcttacatgagggagcacaatcaattaaatggctggtcttctgatgaaaatgactggaatgaaaaactctacccagtgtggaagcggggagacatgaggtggaaaaactcctggaagggtaagtcaaaagattcaaaccaaacacctgcaatttcctacttcagtaagtcttgtagatggtaaagccttttagatcacacggctcacgtcatttccacgaatgacagtgctctcattaccaagtggggaggcacctggacttggcaatattttctttagcccaacactatcacttcctaaaccacaagtaatctccttagaaatttccacattggtagctcttggaatacttttgaagggtgagcagatttagctttaaacctatttagccaacctgggaatgatcatcttcagaaacccagtcaccccaaagccatttttactgtctcaaaggtgtggcttatcagaaacggaaaatctttctttttagataaaagaatgcatccttcagccattggtttcgagatttaaaaatgcagacttctaaaacttgtctccttaacccaacagagctgatttgttttattatcataggtaaatgttcttgctgtgattagagaattcttaactggtctgatttattttttaatttatcttctagagtgttgtactctgaaagctaaagtgaggaatacaaaatataaatttaatatattataaagaggcatatgggtcctctggtccttattaataaagttagctctaaatgtttatgaacgaaaggaaaaagatgctggatcatcgagccccacttttttataccctaggaggccgtgtgcaggcggtcctgaccagtgactcaccagccctcgtgggctcaaatataacatttgcggtgaacctgatattccctagatgccaaaaggaagatgccaatggcaacatagtctatgagaagaactgcagaaatggtaagaacacagtattctcctaaactactggagacccagtttctaaaccttaatgatcacaggtgcttctgtaagtgccagatgctgatctcatcccttgccactgcactccatgagctggatgacagagacagtgagtgtgtggtcctacccagtgccttcatcaacatcaacgtcagccagacctactgcagcaaaccagtggctctcccttgcttggagccctcttcaaaagccacatcaccacctcctgcttttccttagtgtccagttgactggacagagaataccttgctgagtctcagattttgcttttattacttggaactcttttggctactcaaagaatagccaatttgacagatgtttgctgatcagtctaatttaggctgacaaggatttctcaagcaaatgctgtgtagctggcgcaaatgctaaaatgtgtatattttggttttgctttgctcttagtgaaagaaataagctctctatctatgttaaagaggaccaaaggtgcaaatacatcaagggaaattatcttgtcagaatggtacatgctcaaaaaacggagttaatggccggataccatggctcatgcctgtaatcccagcactttgagaggccgaggcaggtgtatcacctgaggtcaggagttcaagaccattctggccaacatggtgaaaccccatctctactaaaaatataaaaattagccaggcgtggtgagatggagtcttgccttgtcacccaggctggagtgcaatggcgcgatcttggttcactgcagtctttgcctcccgggttcaaatgattctcctgcctcagcctcccaagtagctgggattacaggcacccaccaccatgctcagctaatttttgtatttttagtacagacggggtttccccatgttggccaggttggtctcaaacatttgacctcgtggtccgcccgcctcggtctcccaaagcgccgggattacaggcgtgagccaccgcgcccagtcagcatttgtctttctatgcctagcttattgcacttaacatcatggcctccagttccatccatgttgctgcaaacgatgggatttaattctttttatgactgagtaatattccatcacattttctttatccatttatctattgatggatacttaatttggttccatatcctgactattgtgaatactgctgcaacacaggaatacatacatctctttgatggattgatttcctttcttttgtatatattcccagcagtgagattgctggctcatatggtagctctatttttagttttttgaggaacctccatactgttttccatagtggttgtactaatttacattcccaccaacagtgatatactgttggtgatttgtatgacttttttgagaaattgtctattcagatctttcagccatttttgattaatttttttattgatacatgataatcatacacatttctgggctatgcgtgttattttgatacatgcatacaatttatggtgatcaaatcagggtgattgggatatccacctcaaatatttatcatttctttgtgctgagaacattccaaatctttctcttttttttttcttttcttttttgagacagagtttcactttgtcacccaggctggagtgcagtggcacaatcttggctcactgcaacctccacctcccaggttcaagcaattctcctgcctcggcgtcccaagtagctgggattataggcgcatgcagcatgactggctaatttttgtatttttagtagaaacggggtttcaccatgttggccaggctggtctcgaactcctgacctcaagcgatccgcccatctcggcctcccaaagtgctgggattacaggtgtgagccactgcacccagcctaaatctttcttctagctgttttgaaatatacaacaaattgttgttaactatagtcacctagattcaacaattttagcactttgtcataactgcttctttccatatatctataatcatatgtagatataaggatagctatatatatctatctacatctagagacagaaagagggattttaaaaatcatttaaagcatcaaaaatagccaaatatacaaaccttgattggggtgataatggtgtcagggctatttaggacaatgctcttattcttagacatgtgtgccggagtctttatgaataaacagtcatgatgtcaagtgtgtcaggaaaaaaacctacagaaagaggtgtgtcaaaataaaaagataaagtatctctgatttgaataggattgtgacttgaaaacccgataggaagaaaaatacattaaatgatatctctacattggatttttctgaataattgctttgtataaaaccttcattgaaatataacaaattcagaaaagtgcacaagtcataagcatactattggatggattctacatattaagtgtttagttgtctaactacttttaaactagttatgaaaaaaatacgaaaaagtgtttaattcagtgatgcatgcacattgggttttctgagcctagataacactcatggctggtttctatctctgtttagaggctggtttatctgctgatccgtatgtttacaactggacagcatggtcagaggacagtgacggggaaaatggcaccggccaaagccatcataacgtcttccctgatgggaaaccttttcctcaccaccccggatggagaagatggaatttcatctacgtcttccacacacttggttggcttttacaaacccctaagcttcttctttacctttccttaaaatttcaaccttctcttttcttactctataattgagaatgataacacagagagttaataacagtcaccctgctaactttccttagcatgagtgaacagtgagagataaaaatgaaatcttggttaaccttgccaaatctccaggacaccgaagagttaaaaagagagaaaaacaaaaagattaagctctttttcaaaaaaacaaaaccacttaatttttttctacctaaaaccataacaagaaaaaatgctaacacttatttatttgaatggcacatggagaccgggcatgtggctcacacttgtaatcccagcaccttggaaggcggaggcgggtggatcacctgaagtcaggagttcaagaccagcctggccaacatggtgaagtcccgtccctactaaaaatacaaaaattagccaggtgtggtggtgcgcacctgtaatcccagctactcaggaggctgaggcaggagaatcacttgaatccgggaggtggaggttgcagtgagaggagattgagccattgcactccagcctgggcaacagagtgagactccatctcgaaaaacaaacaaacaaacaaaaaacagaatggcacattgatgagcattcattgattgattctttagtttttttatgttctctaaagaatttttaagatttaaagaagcatgtgctatttatttgtaggaaatcctcagaaaaggtacaaataaaaaataaaaattatccataattaataccagagattataattgttaattattatggtgttttctttgctagtatttaagatcattattaagatcacatacacatttttgcttactatcattagcatttgatgatatgatttttttaatttttatacattgttttaatggctgcacgatatttcattgtgtacaaataaaataactactgttccgctttgacctagcccattctgtctttttttaaattacaaatggtattcattttgttgtattattggggaaatgattacttttagaaggagcaaattgagcttattattaattaggctgctaaattcttagtttaaaatgtcactaggtgccacctggcactgagtatttgaaaattgctaccaatcaagcagcctccagattactaaatatttcatctttcatcacagattagagagagctcctcttccttcaattaacttatttacaaatcaggacaaaatattaacaatacatacccattgaacagagtataagctatgtcaaatattatgctcatctatataaatcaattgccttaaagctaacttatttttcactgccattacgaccccattagccaactcaccaaacatttctttgacttgtcactctcatgacagaattctgacattttgcatggagtcacttatgttcactaacactcgccgactctttagcctagtaaacattccaataacttaaccagatcaaatgtctgtatttaaaatcaactttcagcctagaacttgctctgtttgtctaacaagactgccttgaatttctgtcttccactgaggtctcagagttaactgatattctccctcaactaagtatggtctcacctctcagagctgaaactaacattttcctcacgaataacccctgagagacatctcttccccttataacttctgatggaactacccctgcatctcaacgtgaaggaggattccaaaccacacatccctggagagaccagtgtgtttttctcacacgtttgacggtgtgatacacggggtcttgaaacaacccggtctcaaaagcatgcaacctaagatacccagtcagtgacaggtctaaaccaggccccctggcaggattagaaaagttcttgatttgggaatgatagtaagaggagttacagagttttaaaatttgtttaaatgtccttgagccctgaaggagaggaattacttccacctgttagctagcagcagggagggttggacaaagaaaaggaatgactcaggggtgtcctaggaaagtgcctgtggaaccaccccattctgttttatgtctgccatcctctatttcatcacttacgggatttttatttttatttttttgagacagagtctcgctctgtcaccaggctggagtgcagtggtgtgatctcagctcactggaatccccgctccgggtttaaccaattcgtctgcctcagcctcccgagtagcttggattacaggctcgtaccaccacacctagctaattttttgtattttagtagagatggagtttcaccatgttggccaggatggtctccatctcctgacctcgtgatccgcctgcctcggcctcccaaaatgctgggattacaggcatgagctaccgcgcccagccacttgctgtatttttatatacaaatactattaggagatggaggattccagtccccttttaaaaatccacttaataatatagcggaaatagtaacaaaaataaggtaggttattggataaataatttttttaactcttctggacacctcatcattatattaaatgtattttctatggggaaaacatgtatttcaagtgccaaattacttagcacaaacagcatttatttgtaaactaagggctaactgttttatgccactaaacagctttttaaattttaaccaactgtatacaattacatgtatacaactgtgggtttgttttataagattttacattaaaatgagcaccatctccctttctgaagcagcaccacaggcccatcctattttccctcctcagagcaatctataaatggtggtagctagtctttaaggaacagcttcctataatgatgatataatgcagccaataactaaaaatttccatcctcccaaaggtcagtatttccagaaattgggacgatgttcagtgagagtttctgtgaacacagccaatgtgacacttgggcctcaactcatggaagtgactgtctacagaagacatggacgggcatatgttcccatcgcacaagtgaaagatgtgtacgtggtaacaggtgagtggtgtgaactctaactgaggatgaggcacttcattctgttgacgtcaatgggttaaaaaagaggtaaggccaagtgttcggggttaggttacaatgcatctggcccacctaagcttgtgtatttaattagttgtagttcatctgttttccagaatagcttagggaaaccccagaaaacttgcatgtgaaaaggaaaataatgctaaattatccctcattttaatatttcaacctaaaagcatcgtcgaagccctccacttacaatcaagcaatcatgcattctttatttctttgggggatgtatcttttagatcagattcctgtgtttgtgactatgttccagaagaacgatcgaaattcatccgacgaaaccttcctcaaagatctccccattatgtttgatgtcctgattcatgatcctagccacttcctcaattattctaccattaactacaagtggagcttcggggataatactggcctgtttgtttccaccaatcatactgtgaatcacacgtatgtgctcaatggaaccttcagccttaacctcactgtgaaagctgcagcaccaggaccttgtccgccaccgccaccaccacccagaccttcaaaacccaccccttctttaggtaaggtttcgcagtgatctttgagggaggctccttaatggctaacaaaatattcacgcaggtcatattattaaatccctccttaaggggatattgtaaggactctgcggtgattccattttctacctgttgattttttaaagcaaagttatcaccattttacacctatagaacacagaagaaggaagaatgtatgtaaagtcactttgcaaatagaattcagtgacttgtagaaagttctttgaccctcctcatttgcactggtccctgctatgtgtacacactctcccctcttctaacctgtcacatttttgtttatctcccattttttatggctatgagaaggcacactggctccttatacgatcaggtcatttctatgttccttcctctcccccactaatttctttccctaccctgcccacacctacccagtgtccatgaaaacacagctgtacttgaaagcaatttccaaatggtccaagaaagaatgtagcttgagagtatgtctgggttagcaagctgcagtgactcctgacattaaaattgtgctgcatcgtatgtttattgcggcactattcacaatagcaaagacttggaatgaacccaaatgtccatcaatgatagactggattaagaaaatgtggcacatatacaccatagaatactatgcagtcataaaaaaggatgagttcatgtcctttgtaggaacatggatgaagctggaaaccatcattctgagcaaactatcacaaggacagaaaaccaaacgccgcatgttctcattcacaggtgggaactgaacaatgagaacacttggacacagggcggggaacatcacacaccagggcctgtcggggggtaggggtagggaggcgggatggcattaacagaaatacctattgtaaatgacgagttaatgggtgcagcacaccaacatggcacatgtatacatatgtaacaaacctgcactttgtgcacatgtaccctagaacttaaagtaaaatttaaaaaaaagagaaaaataaataaaaataaaactgtgctgcatttaaggcatgattaattcaataccaccctatattaatagtctggggacattcaagaagtccttaagagtccactttgggtagcactggcttccatctgattccccacgctaccccatgccatcaccacccttttcccactgggccagttgcactcagcaccccaggatcctggggatagcaataggctgacatcctctcactggtcacaagagggcgccagggaccaagcccacgacggtccatcatgacgtctggggcttcttgtttttacaaaatcctgtttgttataaattataaagttttacaataagatgttagtaataaaatgagagcttgttaaatcaagcatatctaagtcaagacaacacaagttatcactgatttcgattatctcaaaaatgttttaaattacaaagtttatgcatgttccttagtaaaaattaaaacaatgtagatgtctagagtaaaaagcaaaagtccccactcgtactctcctcccaagagttaaaccctgttaataattgggaggatttctttccagatatttttctatgcatttataaacatatactatatatacacataaggtttgttttggttgtgtaaatgggttcatttacacaagagggctattcatattgttttacaatttgctctttttctaatttaacaaacattatagacatctttccactgttaatacatataagtctatctcactttatccagtggctgcatagtgtttcatagaatgtatgtactgtcatttatttcaccattctcttttttttttttttttttttttttttttgagacagcgtcttgctctaacacccaggctggagtgcagtggcacaatcttggctcactgcaacctccacctcctggactcaagtgatccttctgcctcagcctcccaagtggctgtggctacaggcatacacaaccacacccagctaatttttttattttttagtagagatggggtttcgccgtgttgcccaggctggtctccaactcttgagcacaggtgatctacccaccccagccttccaaagtgctgggattataagcgtgaggcactgtgcccggcccaccattctcttattgatggatgattagattaatcctaattccaactacaattataactgtattgaacaactttaaatatacagcttcattctagtaatcctttaggagaagcaattttttttatctacaactattaatgatcttctttacaaataagaggaccaggtataaaattcaaaataaattacagatgcttttaatatttaagttccagaatggtaaaagacttaatgttaggttgtttaatgttagtctactttgaattgcatttttattaaactagcttgtttttcttataaactatttatatcatagcatgttttaaaaatatatttgaagccaatgaaaagctatttaaaatttctgttgtaatttctccctaggtgacaccataagatataaactagtgggccaggcatggtggctcacatctgtaatcccagcactttgggaggccgaggcaggtggatcacctgaggtcaggagttcgagaccagcctggtcaacatggtgaaaccccgtctctaccgaaaatataaaaattagccgggtgtggtggagagtgtctgtaatcccagctacttgggaggctgaggcagaagaatcgcttgaacctgggaggtggaggttgcagtgagccgagatcgcgccattgcactccagcctgggcgacaagagagaaactctgtctcaaaaaaaaaaaaaaaaaaagatataaactagcaacccctacaagttagttaagttttattgcgaaggaaagctgcctggctttatctaaaggtgttagatcaatcataatcaaccccaaaatgccttaaaccagcatctctcttagggagagcgaggagggacgtttctaaaaggggtctcttctagggagcatttccagctgtacaggccatattaaagggcttggatgaccaagtattatattattgtttggccaaaaaatatgttctctctgctttggtaagtggcttcttaataatgcacagccgaaaatagaaatcaaatgcaaatgcaggagtgaggcagaagccagttgaagaggtgacccaggtagatgtgtttaaatctgagggcagatgcatgtgtgctatttttaagtcacggaattctcttcacttagctaacagtgctattatttgtttttcagacttgtgaacaaatctgaaaaaaaaaaaaaaaaccttttgtaagactgatgctaattactgtaatactctctctatatataaaataacatcatatcatagagaactttcccagagaatcaagagctctcacaccgttctctgggcaacagggacataaataccaaattaaggatgaagttgaccttctttctcatctgtcttttaaggtgtgcgtttctctccattagcccttgaatcataccttgactttatagacacaatgtttgcgaagctccatatgcttttttatttttatttttattttttttttgagatagagtcttgctctgttgcccaggctggagtgcagtagtgcaatctcagctcactgcaacctctgccttctgggttcaagtaattctcctgcttcggcctccctagtagccagcactacaggcatgtgaaccaccatgcccagataatttttctttatttttaatggagactaggttccaccatgttgcccaggttggtctcgaactcctgacctcaagtgatccacctacctcagcctcccaaagtgctgggattacaggtgtgagccaccatgcctggcctccatatgcattttaaaagcattctatctaaggtagaatcactgacttttattatttggtcattttttaagaaaataagctttatttcatttttagcactaaagtatatgcagaacaagagaagttttattttaaaatatgcagggtcgtgattccatgctctaacttgacaactaaattctgcctgtcaagaactttcaaaagaagaaattttatggttttctggagaagagctactgaactcgaatggcctgcacaaacaatcctattgctgtagagtagatcatctgaatctcaggacagacagaacgactgtcttgtcatttccagaggactaatatgaaactcaagggacattcccaagaggctgccacagttcttcctgctggtaaaccactgcattcgatctaacacagtgtctgggcctttctggcctttacctgagcagcatttcccaaagtgtgtgccatggagcagtcatttctagacctgttctgagaactgctctgagaaatctgctttgggcacaggaaaatcacagggatgttcacccgctgacgattctgagaagccctggggaaatctcccagcctgcttcactcacatgtcactaagttagagatgcagctcttatgaggctttgatgtccttccccaagactgagtctacttcacatgtcttttgaaattaaaaagaagattgtattttcagtatcgttattttctttctagattttttatcttgctaaaggagcagcgatgtcttaattagagcctgttaaattgtaactaatagggcattagattctttgctctaattatattcaaggcttatttttcaaaaatgtcttgtattccctcctttccttcctcacatctctgctcatcacagtaagacttttagaatttaagctttggagctgtgagacatccaaacagggaaagaatgatcttttcccatattactgaaagaaagaaactgtgatttattaagtactccctctgcagcagtgatgagcagcaggttttatatactttatctcatttaagtttcatagttcagcccccagaggacagcaggtattgttcttattttacagatgagcaaatagaggcaaaaacagattaaatgatgtgcctgtggtctcaaacagctaaaaacaagggaagctggaatttgagcccagaatacctgcttccaaaattaaaatataactgcatctagtatggccaggtttatttcttcatgaccattgtatcacacattttaatacagtttcaacctttttttgagacggagtctcgctctgtcacccaggctggagtacagtggcgccatctcggctcactgcaagctccgcctcccagtttcacgccattctcctgcctcagcctcctgagtagctgggactacaggcgcccaccaccacacctggctaattttttgtattttttagtagaggcggggtttcaccatgttagtcaggatgggctcgatctcctgacctcatgatctgcccccctcggcctcccaaagtgctgggattacaggcatgagccactgcacccggccagtttcaacgtcttatttgcttcttgtgttcacacaaaatgtgggattatgcttccttacataatttagcaattataataccttatagctctcacatctgtgtaaattatgacacatttagttcaaatttctatagcaatttcatagtatagtgttcctgatatttttctaaaaagcaaatggcaaatgtttagattttttattatatcacatgtatcttttatgttcgtagcaactactctaaaatcttatgattcaaacaccccaggacctgctggtgacaaccccctggagctgagtaggattcctgatgaaaactgccagattaacagatatggccactttcaagccaccatcacaattgtaggtaaggctgaagatgatgaccagtgaggaaggatgctagactccacctagggtcacccactctctctgctaactctgaaggggtagaggtaggtggtaagggcacccctctgcttgtctaagatgacaccacacatgcaagagcaaagaccccattcatttctagattcccacctgcctccccggccttccttccacatcctggtggaaacaagccttctgtgaaggccgcatgctaatgagcctgccctgggcctgtatcccgcctctgcagcccagccatctgaatggggtatgtagggtaaaggaaggctagcatcgagttcctacaacttccactgtcttcccctagttaattttcacaaagtcagacttgtatgtgaaaaggggaaagagcaggccaccacacatggctgtgcatttgggcacagccctaaggcatacaacagagaagacagaggggaactgaagcccaacctgtgctcaccagttctgggagtgaggatggaggtggaagcccaagcagtgtcccctgagtccaagccacttgagaagctggccaaggcctgagcctggggctgcgtctacccaggattaccttttcctgaaacactttccaagatggagtgctactttctgatgcacacaaaggctctaggaacaaaaatctaggctggactgaaaaacagttcagtttgactttggaaatgctgcatggatatgtatcctaagctatgggggtagattgccagatctgatgtgtttctgtatggcaagagggctgtcttccttttttaatttttttcactttctgatgtcttaagagctgtaccttagtccattcaggcttctataacagaattccatagactgggtggcttataaaccaacagcaggaatttatttctcgtagttctaaaggctgggaagtccaagttcaaggtaccagcacattcggtggctggtgaggactcacttcctggttcatagatggcagatagcagtcttcttgctgtgtcctcatgtggtggaagaggcaaaagggctctctggggtcactttcataagggcattaatctcacacatgaaggcttcaccctcatgacctaactacctcccaaagacccccctcctaatgctatcaccttgggggtttcaacatatgaatttcggagggacacaaacattcaatctataccagagtgattgtttggctttgtttgatttctgttgtattttgatgtgtttttctctgggggttattttgttagagggaatcttagaggttaacatcatccagatgacagacgtcctgatgccggtgccatggcctgaaagctccctaatagactttgtcgtgacctgccaagggaggtgagtatattatctccgacagaggcatgggtgggtcaactgaggacctcaagtctgaacaaaggcattgaccaccagttaccccttttaagttgatttgaattcctattgatttgaattcctatttactggtaaccctagacaggaaggtccctaggaggtgctatcaagcacacacatgttttgctacagttgagcaattgagaaagctttaacaattaagttgaataataattatgataactgtttgaacacttaactgaattttttaacaccttatacctgttctcatattgaatcctcacaacaatcgtatgagcctccccattttgcagatgaggcaactgaggccaccagtgatcacaaaacttgcctaccaatggaatgctggtggccaggagagagcagctcacaggagtgctcttaagctcccaggtagttgtctatgctaacattaatagcaacgcctgataatcctctctctttagaatttacaaagctctttccaatgcattatataatttggtttcctatgatttggtcatgaccatatgtaataaactaaatataaatgaatgaatatataaatactatatcgattaactaaatatacattagcaaatcatttgcatataatatataaattacctgattaaaatatatgtgtgtgtagatacataaattaatcaggagaatgaagtggtatgaagatgtggccttatttggtagaagagaagagctaagaagctctccaccttggggagaggaccagaatgagggtgagggtggcagaaaacagtgaaagctgacccagggagtgaagctgctgcgagaggcctggctggtgagaagggggactgtccccatcccaggccccgccccatgagtccagcatcagagcctggtctctccatctaagaaggctgccatgagatagcggtcaggacagcaatggcaggtagcccagcatcaaggacagatgagtcaaacctcttctgttcaagtcccagctccacccctggctgcttgtatgacctggactcgttaatctctctccctgatttgtcatctgttaaactggggtaatgttactttcttcaaaaagctattgagagaggctgggtgctgtggctcatacctgtaatttcagcactttgggaggctgaggcggttgatcacctgaagtcaggagtttgagaccagcctggccaacatggtgaaaccccatctctactaaaaatacaaaaattagccaggagtggtggcaggtgcctgtaatcccagctactcgggaggctgaagcaggagaatctcttgaacctaggaggcagaggttgcagtgagccaagatcatgccattgcactccagcctgggcaacaagagcaaaactctgtctcaaaacaaacaaacaaacaaaaaaactattgagaggaataagcaagatcatgtcatatatctaaaactcactcagaacaaaggtctctgaggaaagataaataaataaataaaattcagtgcccggcacataataagtcctgcaaaaacagctgctgctgttgctgttacacttctacaggaacctaggcagggccaactatggcatctaataatatgtctgcctaacacccaagctatctgcatcttcgaacattctagggatgtagaaggaatatagagggagtgagctgggcttcacgtggtttccatcagccccttcccctgggggagatcttttttttctcctccaccccagggcctcactttcctgaggatgcagagaaaggcatagctcagcgcacaggcttgcttaagagcagattataagactaacaattcagcatcttatagtttgagtaacaatgaggtggaattcaatttcatagaaatgtaatgactttccctttgtaaaatggatctgaccttcctctctccccttctctgtgccctgtgcgccctcgcccacctcccctgtcgcagcattcccacggaggtctgtaccatcatttctgaccccacctgcgagatcacccagaacacagtctgcagccctgtggatgtggatgagatgtgtctgctgactgtgagacgaaccttcaatgggtctgggacgtactgtgtgaacctcaccctgggggatgacacaagcctggctctcacgagcaccctgatttctgttcctgacagaggtgagttttgttttatggccatatgagcatttcatactgcaagtaaagtgtgtatcccatactaaagctatttaggcctttgttttcaatgtttaattctatttcagtacaaaattcattgaactcttattaataaggatctgaggactggcattacaatccaacagcaaatctacttagggaagtgatgagacatctggtgaaatagtggccaaagaaaagccttttgatgaaaaaaaatcagctgtgatcatggaccagtaacaatgggatatgatcactgcacgcttgaatagatttgtatttcaaggagaaagtttaaaggccaatatcaaaaaatagcagtgttctccaatgaaacaacaacaaaggagaggctgatatcacattttcatgaaaatccacctgagcaaagatatgaagcctggaagagaaatgagacacaagctgttctccttggtcccttctaacttaccatgcatcctctctttcccttcccaaactctaccgagcattacagaacacagtaagaaaccaacttattattcctcacatgttcaccagaaaaactactctcttccctctgaatgcttggaaaggtacaatgttaacaaagaagacaaaggaatttcatttagaaatttgcatttactggtagcatccaacttcccccaacctccaaattagggctctaccctaatggccctagctgactgtcactgataatcaactttgttgtaagatattacttgtggcttagaagaagtgctacgtggtaggatgaaagggaaagactaagttgtgtacatattacagcagcagtccccaacctttctgacatcagggacctgttttgtggaagacagtttttccgtgtaacggggatggtgggggatggtttcgggatgaaactgttctacctcagatcatcaggcattagttagagtctcataaggagcatgcaacctagctctctcgcatgtgcagttcacaataaggtttgcactcctatgagaatgtaatgttgccactgagatgacaggaggcagagcttgggcgataatgctcagtcgtttgctgctcacctcctgctgtgtggcccagttcctaacagactgaggacccgtaccagtactggccatcggtctgggggtgggggacccctgcgttaaagcacttacttcactccttaattggagtattgtcaggtacaatctaatagctcattcacttataactcctttgaacttgaagcctatctcataaggtaatatgttcttaaacatgtatttccagctacaaaaacaaacaaacaaacaaacaaaaacacatatttccagctgggcgcggtggctcacgcctgtaatcccagcactttgggaggccaaggtgggcagatcacttgagatcaggagttccaggccagcctggccaacatagtgaaaccccatctctactaaaaatacaaaaattagccaggcatggtggtgggcgcctgtagtcccagctactcgggaggctgaggtaggagaataatttgaaccctggaggcagaggttgcagtgagctgagatgaagacactgcactccagcctggccaacagagtgagactccatctcaaacaaacaaacacaacaaaaaaaactaaaaaaaaaattttctcattaataatataaatggcagttttaatcccattaaaagaagagatttaatcccattaaaagaaaataatcatacatctaattatttgcgtgagggcttattgttggtgatatccaaggtgcagatttaaaagcaaaaccaacgatgcaagggtgccctgcttcctgcccaggaaggtggatcagggcctgggtggagagccggggagggtgggaactggagaagggagccaaaacctctgcatccaagtggccatggactcggatgcagtcaccatcagaagctgctaatgttattccttcagtgctgccacagctcaaagtttgtttagaattacctttagagtcttaattcattctattaagcttcctctgcactggcaaaccactgatctcttatgtgaattagatgttttagacatttgctttcctttaattcttcttgtagtgagtgataactttaggtgggacctgagtcattttcaaaagccaaataaagaaagctcagaatgccaggcacagtggaacatacctgtagtcccagctactcaggaggctggggcgggaggatcccttgagcccagaagtccagcctgggcagcacagcaaaaccctgtctgaaagagagagagagagaaagagagagaaaaagagagagagaaagagagagagagtgagaaagagaaaatgaatgctcagaaggaaaggttttaattcagtggggattgcagcttaatagcttgggtttcaaaggcagaatttcagaaatagatcattcttcaaagcaaacctatagactttagttgaagtgacttttatgtatcgattcaatggatattcatgaagcacctgcaattctttcaacaaatatccctgagcatctactccatgctcagcacagttctaggcagaagatacagttctagatcgagtagaaaccaagacaaagaagtccctgcttctgtgagcagtgacagatgttacatggaaaactttaaaggtggtgatctttttttttttttttgaggcaaggtcttgctctgtcacccaggctgcagtgcagtagggtaatcatggctcactgcagcctcgacctcccgggctcaagcaatccttgacttctgcctcctgagtagctggcaccacaggcatgcgccaccatgccaggctaattttttaattttttgtagagctggggtctcactatgttgcctctgcctcccaaagtgctggtattacaggcatgagccggggaagggcactcctgtaagggggcacggaggtctgaaagagcacggggagtatggccaactttcaggatttttagcacagctagaaggtaagtagagagagaggaagctggaggcacggccgcctgatcacaggagcccttccacacggtggcgctgctgggtcacccaagacctgagcaggtgtctccaggacgtgacatctctcccccgcgcccttaccacagtgttccagacatgctgactcattctctaaatagaagataagctgacccaaagactatgtattatttaatagaaaagattactgaaagcccagagggagccatatatcttctgtgacggctcccttcctcatttatttaatggcattataagcggcatgtcctctaggtggaagacataactaacatgctcttgcttctgttttaagacccagcctcgcctttaaggatggcaaacagtgccctgatctccgttggctgcttggccatatttgtcactgtgatctccctcttggtgtacaagtaagtttttggttcctacgctttatatcactatagtgtattgtcaaaagtgaatatatctctgtgtaaataggcatttttcccttttttgcttttaaacattttgtgtaggggaggaaaatattacattgaatggtgaataccaaactggcctgttaatcttgttgtggtttgtttttaatcctaaaagatgctaccagatctcagtaactttacaaaattatgtcaacttaattttaacatgatagtctcaaattatagtaagcaggcacatttcttgcatgaacaagagtaaataaatgtactttcataagacaccagtgtcttgcaaactgtcaatcatgttaaatggaatgaatccttttatacctggcatgaaaaagattgtagaaagttgtatatttcaactgaagatcttttaaaaataactaaccaacagattgttttcagaaaacacaaggaatacaacccaatagaaaatagtcctgggaatgtggtcagaagcaaaggcctgagtgtctttctcaaccgtgcaaaagccgtgttcttcccgggaaaccaggaaaaggatccgctactcaaaaaccaagaatttaaaggagtttcttaaatttcgaccttgtttctgaagctcacttttcagtgccattgatgtgagatgtgctggagtggctattaacctttttttcctaaagattattgttaaatagatattgtggtttggggaagttgaattttttataggttaaatgtcattttagagatggggagagggattatactgcaggcagcttcagccatgttgtgaaactgataaaagcaacttagcaaggcttcttttcattattttttatgtttcacttataaagtcttaggtaactagtaggatagaaacactgtgtcccgagagtaaggagagaagctactattgattagagcctaacccaggttaactgcaagaagaggcgggatactttcagctttccatgtaactgtatgcataaagccaatgtagtccagtttctaagatcatgttccaagctaactgaatcccacttcaatacacactcatgaactcctgatggaacaataacaggcccaagcctgtggtatgatgtgcacacttgctagactcagaaaaaatactactctcataaatgggtgggagtattttggtgacaacctactttgcttggctgagtgaaggaatgatattcatatattcatttattccatggacatttagttagtgctttttatataccaggcatgatgctgagtgacactcttgtgtatatttccaaatttttgtacagtcgctgcacatatttgaaatcatatattaagactttccaaagatgaggtccctggtttttcatggcaacttgatcagtaaggatttcacctctgtttgtaactaaaaccatctactatatgttagacatgacattctttttctctccttcctgaaaaataaagtgtgggaagagacaagaccttggtattgtaattatttttctgattcatcatttgcttttcaatttcacttacagttgtttcttttttttagatgagggtctccctatattgtccaagctggtctcagactcctggcctcaaaggatcctcctgcctcagcatcccaaagcgctgggattacaggagtaagccactgtacccagcctcaatttcatttatagtttttgacaagtaaaaagttgtttaacaatgtctcatagagcattgataatctcataaatattttttacctaactacatatatatatatatatatatatatatatatatatatatatatatatatatatggctgagcacagtggctcacacctataatcccagcactttgggaggctgaggcaggcagactgcttaagctcagcagtttgagaccagcctgggcaacatgatgaaaccccgtctctacaaaaaatacaaaaattagccaggcctgatggtacatgcctgtagtcccagctactcaggaggctggggtgggaggatcacttcagccctggaggtcaaggctgcagtgagccgagatggtgccactgcactccagcctaggaaacagagccagattctgtctcaaaaaaaaaaaaagatatatatatatatatctttcaaatatctgtatatacacacaatcacatcatatgtgaaacttcaaataaaagtttaatgtgtaaatgtatataatcagatcaatctaaaagaagagattttctataagcgattgtcctggactctttgagtaatcagtatcatattaaaaataaaggcagggggtggaattctaggtcacagtttagtaaactttttccataaagggctgggtactaaatctcttaggctttatgggccacacagtctcgatcgcaactgctcaactctctcattgtagcgtgaaaacaaccatagacattacataaataaaagagcctggctgtgttccagcaaaaatgtatttacaaaaacaggtggtaggccagatttggcccatgggacatagtttgcctgttttacactaatggagacaaaatggacacagcaaccaaacgcaatttgagaatctacattggatcctagcttgaggaaaaaacagtgatgaaagatattcgtgggacaactggggaaacttgagtacacactggataccagatgatattatagaattgttaattttcttaaggaatggtaaaggtattgtggggattaacatttagtctaggttcttcatttcctggatgacctagaggccaaaaaaaatacagctatttgttctaaaatcgcttccaaagagtgtaaaatttgcagaacaagaattgagatttctccccatttacgtgatgactgtagggccatggttctcaaccaggggtgattttgccccctagaggacatttggcaatgtttggagacatttgtggttgtcacaactagggtgggatacaactggcatcccgtggttagaggccagtaatgttgcccaacatcctacaatctacaagacaaccaccacaacaaagaattatctggcccatggagggcgcagtggatcctgcctgtaatcccagcactttgggagaccgaggaaggtgaatcacctgagcttagaagtttgagaccagcctggtcaacacagcaaaaaccccgtctctactaaaaatacaaaaattagccaggtgtggtggcgcacgctggtaatcccagctacccaagaggctaaggcatgagaatcacttgaacccaggaggcagaggttgcagtgagctgagatcgcaccactgcattccagcctgggagacagaaggagactccatctcaaaaaacaaacaaacaaacaaaaaacaattatctgaccctgaatgtagaaccaccctgctttgtagtgactactgaagctctgggcatggacatgaagacagaagactatttgaatccagccctgccactgaagtctgagtaactctgggcaagttgtttgacccttcctgagcctttcctttctcagtctcctcatctgtaaaatgggtatgtctgccctccttggctacttcacagggctgcggcacatgcatctgcccgaatgagtgggcatggaagcaccctgtttatggcatggtggtatgtactccatgtgaggcctgaggacggaagcagtgtggagaggctgtatcatctttataatgactaggaggccaagacattagtacctaaagcaaaaaagtaatttcaaattgcagcagaatcacctgaagtttggttaaaacacatattgctgggcccacccccagagcttcgaattcactgttctggggtgaggccccttaaggctttctaacaagtttccagataatcctgctactgctgggtggaaggaactaacgttgagaaatttggtcttgaaatccgctctttccttcccttatcaacagggggtagcagagagcagcaaatagacagtcattctttgaggaagcaggtcaaaatcctcatcaaacctccctcagtttcaatctaacaagtggcaggagagagggctgaaatagtgaattatttaaatttatattatccctatgaccccagcaacaagtcatttaacttgtgctgaatcacaatttgtgaaacgggggaagcaacctaaaagatagtgagataatttgattaatgtttgttgagcgttagaacttccaaagaaaattgaaatgtataggtaataaattattctgggaatttcttattcttgggactttttctaaatgtctgcattttaaacacttctgactcatttataaacattggttgccctcattgaattttcaattgtttaatagtttagagggcaatacgttcaatgcactcattacatccagaatgtgtagcaacttcaaaccagagtgacagtgtaagggcagatgagaaggtggtcatccaggggtgatggtgaccacattctgatggggcttttggtgggggaaaatcctttaaggtttttaaaagaatggttccaaagctgccagaatagttaccttaaaaaatcagagttcaggccgggcgcagtggctcacacctgtaatcccagcactttgggaggccaaggcgggcagatcacctgaggtcaggagttcgagaccagcctggccagcatggtgaaaccccgtctctactaaaattacaaaaattagctggatgtggtggcaggtggctgtcaccccagctactcgggaggcttgagaatcgcttgagcccaggagaaggaggttgcaatgagctgagagtgcaccattgcactccagcctgggtaacagagtgaggccctgtcccaaaaaaaaaaaaaaaaaagcagagttcagctcccaggaatcaccccttgcagactgatttcaattattcaactgtcatttactgggcaccagtatgtcccaagctcttgtctaggagaggactcaatagtgacaagagagacaaggactctgttctcatagagcttggattccagactaatgtaacatgtcaccgcacaagtgtcactgcaggaagagcgctaagctctgacccggagtcccccatcttggtcaaccccactggcctcagcttaatctgcagggacagttcctctgctgcttagaactgaacagccattcctattgtccttgaaattctggaataaattttttctttggcgctctcccataggcattttgggatttgggtaccttaatggtatattagtatttaaccaattttcattctatgtataattttctcacaaatgtcatgtcatctcactaatcaaaatgtttctccagtttacaatgtaactgccattattaatttcactgcatgggtttgttgttttgttttattttggttttgagacagggtctcactctgtcactcaggctggagtacagcggtgcgatctcagctcactacgacttccgcctcctgggctcaagcgattctcccacctcagcaccccagagtagctaggaccacaggtatgcaccaccacaccagactaatttttgtatttttagtagagatgggattttgccatgttggccaggctggtctcagactcctgagcttaagtgatccacatgcctcagcctcccaaagtgctgggattacagggaggagccaccatgcctgacctattgtataggttttaatgatgcaaattaagtatcaagatttgggcttattgagtccttaattttaaagtgtttattttttattttattttttgagacagagttttggtcttgtcacccaggctggagtgcaatggcacaatctcggctcactgcaacctccgcctcctgggttcaagtgattctcctgcctcagcctcctgactagctgggattacaggtacctgccaccacacccagctaatttttgtatttttagcagaggcggggttccaccatgttggccaggctggtctcgaactcctgacttcaagtgatccacccgcctcggcctcccaaagtgttgggattacaggcatgagccaccacgcccagctaaaatgtttattgaaataaattcctttagagcaaaaaaagattagccactgatgagaatgtggcagaaggattttgtggctgtggatatggcttcaaaatttgatttttggaattgagtagaggaagataactaggacttacattgagagacctgagctgcagcaagatgtcttagctagatgacctgaaaccagtcattctcccttttctctactgcagcctccttatctgcaaattggaggcaagaaggtggcgagggaaattaaactgggtgaactctaaagtctctccaggttctcatgttctactgtgcaatatggggaggataatattacccagtttccttatagagatgtcaggaggattatattctaaatcaggggttggcaaactgcagtttaccggccaaagccagccctctgcctatttttgtatggcatacaagctaaatatagttttcatattttttaatggtttggggaaaaaatcaaaagaatgataccattttgtgacacataaaaatgacataaaattcaaattttggtgtccataaatgaagttttgttggaacacagccacattcattcattacatattgtctcagctctgcttctgcattgcaacagcagagctgagtagtgtgacagagactgcatggcctgggagccctaaaaatatttactatctggctctttacagaatgagtttgctcatctgtgttctaaagcatgctggactccacttagaactgaactgggcaaacaagatttattcagagaacttcaattatgtgagacataattttctttctttttacatttctttaaaaaaaaatttttttttaggggtttcaccacattgcccaggctggtcttgaactcctggactcaagtgatccacccactttggccctcccaaactgctgggattacaggtgtgagccactgcaccaggccaattttcataatagagcactttgatctcttaccctcaatttcatgtcacattcattattctgaagtgatgacaaatgttgtattatgtgccatagtaagctaagtgtatattgctaatgaattgccatcctgggatgtcataaaagacctttctgaagaaaaaaaattctaagaatcctctcaagagcttatacaaataggagaatcataacacgaggaagcaagtgatttggggagaatttcacacatccccaaaagcaccaaccataaagaaaaagattgatatatctgattatgtcatcatttaaaagtatacaaagggccaggcgctgtggctgacacctgtaatcccagcactttggcaggccaaggcgggcggattgcctgagctcaggagttcaagaccagcctggccaacatggtgaaaccctgtctctactaaaataccaaaaattagccaggtgtggtggtgcacgcctgtagtcccagctacttgggaggctgaggcaggagaatggcgtgaacccgggaggcagagctggcagtgagctgagatcacgccactgcactccagcctgggcgacagagtgagactccgtctcaaaaaataataataataataaataaataaaataaaagtatatgaaaaagacattacaaacttcttgtttgtagaaaagaaccacagaattctcattcactgctggtggaaatgcaacatggaacaaccactttggaacagttcagcagttttttataaggttaaatatacacataccataactcctaggtatttacccaagagaaataagatatatgttcatacaatgacttgtactcagatgttcacaatagtgttatttctaatagccacaaactagaaacaatcttaagtttccaccaactggagaatagataaataaattgtggtatatccatgtactgaaatacagtcatgcactgcataaagacattacatatatgcaacagtggtcccataagattataatggagctgaaaaattcctattgcctagtatttacaatattatactttgtatcatttattttagagtgtagagtgtatcatctattttataagtaaagtccttctacttatttaaaaaaaaaaaagttaactgtacaccagcctcaggcaggtccttcaggaggtatttcagaagaaggcattgttattaaaacagatgacagtcccatgggtgttattgcccctgaagaccacccactgggacaagatgtggaggtggaagacagtgatactgatgatcctgaccctgtgtaggcctaggctaatatgtgtgtttgtgtcttagtttttaataaaaagtttattaaggtctcttggcattgtgttttgtttttgtttttgaaatggagtctctgttgcccaggctggagtgcagtggcatgatcttggctcactgcaagctccacttcccaagttcaagtgattctcctgcctcagcctcccaagtagctgggactacaggcacgggcaccacactcagctaatctttgtatttttagtagggatgaggttttgccatgttggccaggctggtctcgaactcctggcctaaagtgatctgcccaccacggcctcccaaagtgctgggattataagcgtgagcactgcgcccagccacttgatgttgattttaaaaagtttaaaaagaaaaaaaataaaaatatttaaatagaaaaaagcttatagaataagaatagaattttataatattgtaatattattttacaatacttacaatatcgtaataattgtattattacaaaagagtcaaaaaaggccagttgtggtggctcatgcctataatcccagcattttgggaggctgagacaggcagattgtttgagcccaggaatttgagacaaacctgggcaacatggtgagaccacatctgtacaaaaaatacaaaaattagccaggcatggtgacacgtgcctgtagtcccagctactcaggaggttgaggtgggaggattgattaagccaaggatggagaggctgcgttgagctgtgatcacaccactgcactccaacctggacaacagagtgagactctgtctcaaaaaaaagaaaaaaaaaactgttaagaactgttctttgggaggccgaggcaggtggatcacaaggtcaggatttccagaccagcctggccacgatggtgaaaccccatctctactaaaaatacaaaaatgagccaggtgtggtggtgggcacctgtaatcccagctattcggaggccgaggcagagaattgattgaactcggcaggcagaggttgcagggggccaggctcatgcctgtaatcccagcactctgggaggccaaggcaggtggatcacctgaggtcaggagtttgaaacaagcctgaccaacatggtgaaatcccgtctctactaaaaatgcaaaaattagctgggtgtggttgtggacacctgtaatcccagctactcaggaggctgagacaggagaatcacttgaacccgggaggcggagtttgcggtgagctgagatcatgccactgcactccagcctgggtaatagagcaggactctgtctcaaaaaaaaaaaaaaaaaagaactgttagggaaatggaaactaccatacaatgagacatcatttcacacccaccagattgccaaagatgaaaaaatatctgacaaaatcaagtgttgaaagaaagtgcaactttgctgttgggattttaaattgaaacaatggctctggaaaacaatctggcatcatctggtgaaactgaagatgcacatgcctaggatccagcaatctcactcctaggtaggtaacgccccagagaaacccttgcaacatgtgttccaggggacacacataagaatactcagagcagtaggaggaataacccaaatgtccatcaacagcagaatgggtaaatcggttgtgatatgcaatggaatgtgttttgttttgttttgttttgttttgagacagagtctcgctctgtcacccagactagagtgcagtggtgccatctcagctcactgcaaactccacctgccgggttcaagtgattctcctgcctcagcctcccaagtagctgaaattacaggcatgcaccaccacgcctggctaatttttgtatttttagtagagatggggttttaccatgttggccaggctggtctcgaactcctgacctcaaataatctgcctgcctcagctcccaaagtgctgggattacaggcacccaggtgatatgcaatggactatgaagccatattctagtaaaaacgaatgagatgatagctataagcaccaagagagaagacaccaacataatgtagacagaaaaaagcaagttgcaaaagaatgcatacaacatgataccatttatataaagttttcaaactccaggctggagtgcagtggtatgatcttgactcactgcaatctctgcctcccgggttcaagtgattctcatgcctcagcctccagagcagctgggattacaggtgcccgtcacgacacccagctaatttttgtatttttagtagagatggagtttcaccacgttgatcaggctggtcttgaactcctgacctcaagtgatccacccaccttggcctcccaaactgctgggattacaggcatgagacaccacgcctggcctctgtaacattttatttctaaaggataaaataattaacataaaataaaaattcgctgggctgaatttttaatacttttttaaaagaacaagttaatgactatcttttcattccttgtgagtctgaacaacctaatatgaataaaatgtaaagaattccattcaaggccgagcacagtggctcatgcccataatccctgcactttgggcagcctaggtgggtggatcacctgaggtcaggagtttgagaccaacctagccaacatagtgaaaccccatctccactaaaaatacaaaaattagcctggtgtggtggcacacgcctgtagtcccagctactcgggaggctgaggcaggagaatcgcttgaatccaggaggcagaggttgcagtgagccgagatcccatgacaaagcgagactctttctcaaaaaaaaaaaaacaaaagaaagaaaaaaaacagttccattcaagactgtctagagcttcttggccttttcctgtaaaatctaccttccaagttaatgatgttatttctggttggtgactgttggtggctgactcagaaaatttacttggcctcatctctaaaatgagaagactggacttctgcaaccctgaaagctcctaacaagaggtagccgagaacatttcgcactcatggggtccttggagggctacagcagcaagctttgctttggtaacagaaggctgcttcagcaggtgagctgtgtttcaaagctcccagctgctgccttccttcattttaatgctgtatgaaaatagctgctaacccattggtcctgggccccatagatatcaaacatgtcctgaggggacacttggctcaaaagccagtgacattttgattccactcccagcctgagtcttccctaagcaactcataaggttattgaggagaaaaatgcaaatatgttcaccaataccatttcatcccctgaggactgggttaaaaatgctcttaaatcaaacttgtccaatctgtggcccacgggccacacatgacccaggacagctttgaatgcaccccaacacaaatttgtaaactttcttaaaacattggactttttttgcgattttttttttaaaacttatcagccatcattactgttagtgtattttatgtgtggcccaagacaattctttttcgaatgtggcccagaaaagtcaaaagattggacacccctgtcttaaatgatggactcttatgatacctttaggtaataagtccttgtatgttgtgtttttcttaacaaacaaaatctcttttctcgacaacattcttccataaggctatcaatccagatctggattatacagtaatgaggcagaacagggaattagggtaaccaagggttaaggtagaagcaaaagaccagcaggtgcagccagttctaggcaagattaggcagcagacaggcagcagaccggccacatcctcactcctgtgatgagacagaagtttccactttggcctctgattaagcgcggacgaatctctactttagcctctgattggtcacgggccaatccttcatagagtgtaaccaattggagccctctaatgggcacgtaggggtgttaccaaatacttttagcttaataaaaacccttgaagaccatcataacgggaagtcttcggccgcttgctctaacctgcttccgttctgtgagttgtacttttgttctaataagtctgtgatttcctgacttcgttgttttgtttatcttttgttgcttcttgtgttttgttcaactctgtccaagacaccaagaacttggaccattcacagtcaagaccttccatccagtaaaagtaacgtcctctaaatggttttcccaactccctctctctccacccctctccttcccctctctctctcccttccttccccctctctcccttccttcccccctctcccccctccttccccctctctcccccttccttccccctctcttccccttcctcccccctctcttccccctccttccccctctcctccctccttccccctctcccccctccttccactctctcctccctccttcccctttccactaccctctcctcgcttcctccttcccctctccactccactctccaacaccccccctcccccgtctcctgctcattgctttcaaggctatctttttgttgttgtttttggagagagagtctcactctatcgcccagactggagtgcagtggcgtgatcttggttcactgcaacctctgcctcctgggttcaagtgattcttctgcctcagcctctgaagtagctgggactacaggcacgcgccaccacacctggctaatttttatttttaaaatttatttatttttagtagagatggggttttgccatgttgtccaggctactctcgaactcttgagctcaggcaatctgcccaccttagcttcctgaagtgctaggattataggcatgagccaccgtgcccggcctcaaggccatcttttttatttttcttatttttatttttgagacagagtctctctctgttgcccagcctggggtgcaatggcgcgatctcagctcaccgcaacctccgcctcccgggttcaagtgattctcctgtctcagctccccgggtagctggaattacaggcgcacgctaccacgcccggctactttttgtatttttttttagtagagacggggtttcaccatgttagccaggctgcttttgaacccctgacataaggtgatatgcccgcctcggactcccaaagtgttgggattacaggcatgaagctgccgcgccctgccaaggccatcttttaaaaggtaactttggaggctgggcacggtggctcacgcctgtaatcccagcactttggaagaccgaggcgggcagatcacgaggtcaaatgttcaaggccatcctggccaacatggtgaaaccccatctctactaaaaatacaaaaattagctgggcatggtggcgcacacctgtaatcccaactactccagaggctgaggcaggagaatcgcttgaacccggcaggcagaggttgcagtgaaccgagatcacgccactgcactccagtctggctgatagagctgtctcaaaaaaagaagaaaaaaagggtagctttggaattgtcgagccactattaagaagccttcagtggtcccccatcacctacagggaaaatccaaactcttcggtgtggcctccatggctggctgtagtggcggttgggaagtgcgacctctgtaaataccaagtgccttcgttcatatgaggatttaagttttgccctaaatccttccttaccttgtaatgcgcctagagcaagaggagacaggtgttgcaacaaaggcccggggccctgtgctggggatcatgccctgtatatgatgcaccttgctgtgtgtggcaaggctgaaaagggcctatagtccctcttcatctgtgccaccctccctctccaccctcaagccccaccacttcctgtctgaaccctgtcatctggccatttggttgattcactctgtcttgcaccacacatgtccccttcctgcctccagtctcggggctctctctgttctctccatgctcctcctttcccgcccggcacaaagtgctttctcctgttttcaacaaaatgcctattgagtacctgctttgtgctggaatctctaatctttttgcacacaattggaacaggttttttttttcttaatttaggtggatcccagtgactatggctgcataacaaacacccccaacttagtggtataaacaactgctttattatgctcacaggttctgtgggtggaggatttggacagggcacaacagggatggcccatttctcctctacaatgtctgaggcctcagctgagaaaactcaaagctgggggctagaattatccagaagcttcttcactcatgtgtctgggacctgaactgggatgaatcaaaggctgggcccagctgggactattgaccacagcatgcatgtggcctctcgtacttctcacttgatgtgttctgagagtgtccccagagggatgactagagagatctaagtggggctgggcatggtggctcacgcctgtaatcccaacactttgggaggccaaggtgggtggatcacttgagcccaggagttcgagaccagcctgggcaacatgatgaaaccccatctctacaaaaaacttaaactagtcaggcgtggtggtgcagacctgtggtgccagctcccagggaggctgaagtgggaggatggcatgagcctgggaggttgaggctgctgctgcacagcctttccaaatctagccttggatgccatgtagtgtcacttaagccatgttttattggtgggaacactcctgagtccattcaggtgtaaggagaggagacatagaccccacccctcaatgggcaaaagtgtcaaagaattaggagttatgcttttaaatggccacaaggcatcattctactgtgggatacactgttatttaaatcccttatttttctacttcaaacgtttgtgtcttcttctacatggtaagcccagtgaagccaaagcctgggtattcctggagtacctacctggtcagtccctttctggtacagaaaacccttcgaagccatctaattcaattccatcattaaatggtggctccaaggcaacttgctgattgactgctatttacaggccataaatacaaactttattttttatttatttatttttttggagatggagtctctgttgcccaggctggagtgccatgttgcgatcttgactcacccaggttcaagtgattctcctgcctcagcctcttgagtagttgggactacaggtgtctgccaccatgcccggctaatttttgtatttttagtagagacagggtttcaccatgttggccaggctggtctcgaactcctgacctcaggtgatccacctgccttggcctcccgaagtgctgggattacaggcgttagccactgtgcctggccaaactttagatctttaactaagattttcttacctgatttactggtgcaagtagaatagctgttccagttaaaactcctgacacccaaacccgttgcagcttctgcagaagcagatcttgtaatcaagtaggtagggaacctcggacaagcatggctcaagagccccacactgggctgggcgtggaggctcatgcctgtaatcctggcactttgggaggccgaggcgggcagatcacgaggccaggagttcgagaccagcttgaccaacatggtgaaaccccctctctactaaaaaaaaaaaaaaaaaaaatacaaaattagctcagcctcgtggcacgcgcctgtgatcccagctactaatgaggctgaggcaggagaatggtgtaaacccgggaggcggaggttgcagtgagccaagatcgtgccactgcactccagcctgggcgacagagggagaccctgtctcaaaaaaaaagcctcacacttaaaccctgttgctactggaggatctgcctttgatgtggtaacctaacagagaagagcagaaccagtgtgaaaacgaaggcaaaacaatgcagagttcaagtcacatttgtgttctagcaaggcaaaaccctctgcattggcttttttttttttttttttgagacggagtctcgcttttttgcccaggccagactgcagtggcgcgatctcggctcactgcaagctccatgccaatttcctgcctcagcctcccgagtagctgggactacaggcgcccgccaccacgcctggctaattttttgtatttttggtagagacggggtttcaccgtgttagccaggatggtcttgatctcctgacctcctgatccgcccgcctcggcctcccaaagtgctgggattacaggcctgagccacggcgcccggcctgcactggctttttagtcagctgaaaacgtattttctggaatgttttcccaccgtcattacctgtacagcctagagcctgaacacttctgggaacacaaattctagacagagaaaacttgagggagttgttcttgaaagaaaacactggcttagaattcttctcaattgaggattttaaaaaacaggatgaccttgaattgaacttcttagaatcagtgcaggccactctgattcgctccaaacttggaggtctcattcacagcagtctcttggtggggcacattgcaaaaatgttgtaacagcggttgttgctataacatccccccagagactgttagggtcttaattagatcgtaacatattatttccaaactctaaatagagaacaaatagctttcctccacatcctcgcccactttcatctttttgatattagccattctaacaggatgaggggccgtcccattgtgtggttgtgtttctttttcttaattgacatagtgttctgtcatttttcctcccgattgttactgtagttccaatttgcgtttccctaatggttagtgatgctgaacggttttgcatgaacctgttggccatttttatgtcctttgcccattttaaaaatcaggttttcttgctattgagttgcatgagttccttaaagggttaatatacaaaacgtttaccagatgtgtggtttgcaaatatttttcctactctgtggagtatcttttcactttgttaattattttgctgtacaaaagctttttagttttacgcaaccccatttgcctatttttgcttttgttgtttgagcattcaaggtcatagccaaaaaagaagaagaaaaaaaaatccttgactagatcagtgttgtagagcaagcttatccaacttgtggcccacaggtcatatgcggcccaggatggctttgaatgacgctcaacacaaatacgtaaacattcttaaaacattacgagattttttaggccaggcatggtggctcatgtacttggggaggccgaggtaggcagatcacctgaggtcaggagtttgagaccagcctggccaacatggcgaaaccccgtgtctcctaaaaatacaaaaattagccaggtgtggtggtgcgtacctgtagtcccaaatagttggtaggggcgagatcacgccactgcactccagcctgggcaacagagcaagattctgtctcaaaacaaacaaaaaaatactgaggtttctttttttttttttccagctcatcagctatcattggtattagtgtgttgtatgtgtggcccaagacaattcttcttccaatgtggcccttaaaagaggtcttcaacctcttttaagattttttttccaaggtataaaataagggagctgtacttctgatattgttaccttgttcctaaaagtagtagcagctgtaagcgccaaataataacatagcctgacagaaatggagtgtcctggctgggcgcagtggctcacacctgtaattccagcactttgggaggccgaggtgggtggatcatgcggtcaggattttgagaccagcctggccaagatggtgaaaccccgtttctactaaaaatacaaaaattagccaggcatggtggcaggtgcctgcaatcccaccctctcgggaggcggaggcaggagaatcacttgaacctgggaggcggaggttgcagtgagccgagatcatgccatggcattccagcctgggcgacagagcaggactctttcttgaaaggaaagaaaggaaaaggaaagaaaaaaaggaaaaggaaagaaaaaaaggaacaggaaagaaagaaaaaggaaagaaagggaaagaaaggcgtgtccttggaagccactcacacctcactaggactcaggcttggaccttttcccaggaagctaaggcagcctcttgatattttaataaggctgaatatggatcagcctgtagtgttcctgaactcattagctacacttctcagaatttctttgcagtttggatttgtgaaaccaccaggcagataggagaattgattggccacaactgtttgggaatgaatgtctattgtcagatgctttcctgaagtgtgaccaaaaagtttggagtagtaaagtccaaggccaaagttccagcttgacctgctctgtgaggtgttccctcacccccctaggtggaattaatcactctgacctgccttcctagaacttggggctccctactgtggtggaagtgttccttcaagggacttgcccccaaaccacaagctccccaaaacgcactggcagaggaggcaggctttgtttcttttgcccagccctctagagttcagcagccagaggttcccctcacccgttaatcacaatgcctcaaatctcacaataattccaaaatggaggaacctcataaaactgggataagaaaatgaaaagcagaagttttactggattgtcagcagagctgatcaaaagaaatcggaggccctttagaaatcaggttttggcagaaagaaaacaacccaaggtctggtcttatgacatagtggggagtgaggccgtgtcgcacctgtgaatcaatacttaatatcacagttcagctctggggacaaaacacttcacaggctgtggtagatatggcagtaaaaacccatgggcttctccaggggttgataccgtcactgtggtattctcctggcctgtaacatcacctcacagcacctccaagttgcatccctttaggggtttccattccccccaagtccattgtgaaaggggccccctgaagttggctaatttggggccctgtagtccactctccttacctctgcctcaagacccaggtctgttcaaatagcacctccctgcagagacttttccagctctgggggagaattgctgctgtgtaccacagcaggtgggctctcctctttcaaacacaattacacggtattgatgacatttaatcatcatctctcctactctctgggagctccctgggtacagatactatgttttgttttttatttatttatttatttgtttattttgagacggagttttgctcttgttgcccaggctggaatgcaatggtgtgatctcacctcactgcaacctccgcctcctgggttcaagtgtttctcctgcctcaacctcttgagtagctgggatcacaggcacctgccaccatgcctggctaattttttgtatttttagtattggccaggctggtctcgaactcctgacctcaagtgatccacccacctcggcctctgaaggtgctgggattataggcgtgagccaccacgcccagctgagacaatgttttattcatctttcctctctctggccttagtccagcgcctggcacagaatgttcacttgaaccttggtgaggctccttgggagggtgaatcacaagtctacgcagagtgacccacaacctgcaaagcccacctaccaacatcggggtgacaagaggggaccccaataccaatttctgaggctgtgggaaaaacagtctggctctgtgacagggcccagtaatccaaggggccaatgtgagtgttcagaggcacagcttcagaacaaacaacggctgtgaaagctgaggaaacaatgctgcaagggatgggagtcacagcctgcactttggttccacaaatagactaggcaaatggtggaggagcggcctcctcacatgggaacctcctatgggagaggctgcaagcagtgctctgggacgcttgcaaaccacaggctcggtgccctgagaagccaacagctcatctcatcgcaggcctcggtgcccaccccaggctgctctccctgcccttacaagcccggaagacatgcctggcaaacccacacagaacatctgagtgggacagacaatacgaaccccacagccccaggggagtttggggtgcagagagctagtaccttactcctaggtttataaaatacaaagtccctgtttgtcttctcttgaaaaggattttgtcttccttccaatgaggatatttacaaagtgggggacaaaataattttaaaaatataaatatacaaatccatagtatttataacattataagagaggtcattttaatcctggcccttccttctgcaaggtctctggagggcagaaccagtacaaaggcagtggaaatccaggaaaaaggattaagtttacatgaggtgggaatattcaccaacagctacagctgcctggtggtggaatgagctgtcctatgatgatgggaagggtaagctgaggctgcagggtgagcagtgattccaacattttagttataatgaacttttgtcgtaaaatgtatggctctttaaatgtctgttattgagctcggcatggtgcctgtaatcccagtgctttgggaggccaaggcaggaggattccttgaggacaggagtttgagaccaacctgggcaacgtagcaaggctgtgtctctacaaaaagttaaaaattagccaggcatggtggcatatgcctgtagtcccagctgctcaggaggctgaggcaagagaattgcttgagcccaggagttcaaagttaagtgagctatgatcatgtcactgccctccagcctgggtgacaaagagatcctgtctcaaaaaaaaaaaaaaatcattcagtacatgcatgacaaagagctacttgaaacaaagccacacttttaaatttttattgaattgcaataccatctacacctatttgctgtgagggacacatttatttggcccaaagacaatgtttgatgcacatgtggatttgagggtcctctgctgtcaaaagggggttcatggtccacagcttaagaaacacagatgcataataaattcatgcattgagtaagcagaggtcagagtgataagcttcccagtatcaaaattatataaacgtagtcatttatacactatgtgccagtcccgtaatgtgtgatgttaaggtccctatggtccagtatgggcacatcaggaagcttgcgcaatctctccctagtttagcccttgggcctttggcccagcctgctctgtatttctctgaagcaagatcctgaggtctgtgtggtgtcatctcccaaagtaggcccctaccttctccccagcccctgaggctagctgcagagaaagtgtttgtgactgcagcttctcaccttcccatgaagccccaggacacaaatttgggaaccttttggctctgctgctaacacagcaaacaggaggctcccaaattaccacaccagggatgtaattagggtctgtaatagggaagtccttgtactaatggactgtagttaatttataattcctgactcaggaagttgcttttggcttcaatcctctggctcagtaccccaaaggtagtgattatcaaaccacccccacttctgattctgcctttactaagcaaccaatgtctgaaaacaatgtccaagcccatgagtagatggcagttttgggggaaagaggggcattttgcatttctgagaacctctctaattttcctcaggaaatatgacctgtaaaaatggattttggtaattaacattaaggacatgcatagtgctggcaaaccttgtctctgaaatcacagatgatgagaaactgttgtttggaatcatttcagtgagaatggaacatcccggtcttgcctgaagactccgcatgggggtcatttcacatcattccacacaaagacacagcttcagcatcaatcctccccaagggccagcactccacatttatcttaacttttatagttctaaggaacaaggaccctgagtctgtttctcagccctgctgctaatcagaatgtgatgttcctagtgaagcctaaaataatgtttttaataggacatgattctccccagaccacacgactcttgtgagtgactgaccaataacatctccagcccctgtgaacattctcctgtctcctgaacaaagattactgagaaaaattcctaaacttcccttgcttcaggacagcacccagtccacagctgacaccacttcctctgatctctccttagactcactgagcataagcacgagccctaaacaaagccccttctagtccctcttcctgagctgctcctctgtcctccatagcatgcagtctcccttgctacagcgagttaataaaactaactttgggccaggtgcggtggctcacacctgtaatcccagcactttgggaggccaagatgggaggatcacaaggtcaggagttcgagcctagcctggccaacgtggcgaaaccccgtctctattaaacatacaaaaaaattagccaggcgtggtggtgcacgcctataatcttagctactcaggaggctgagacagaagaattgcttgaacccgggaggcggaggttgcagtgagctgagattgcaccactgcactccagcctgcgtgacagagcgagactccgtctcaggaaaaaaaaaaactttgaccacacgtgttcctggttgtctttttctgatgggctttatcataatgactgggttcaagccatttcctctccatgaggtcaatttgtagacagatactaatttccatatgattactacatgccaagcactatggtatataatttgtgctgcatattttatccaatttttcgagactctgtgaagaaggtatcattccctcattttacagatgaggaaactgaggctcagattaagaacttcaatagtacactgctaataaacagaagaggtggaattaaatctaagtcttttctagtggggtatcatgcagtcaaacataaatgttaaagacatttatgaacaaagggatgaggggtttctgaggggccatctgagagagtagggggagatatcttaatgcttaaggtatgtcttacagagtgagtctgagtttgtcatatgaaaaaatgggaaaagggtgctctaaaaagagtagtggccaagcacggtggctcacacccgtaatcccaacactttgggaggctgaggcgggtggatcacttgaggtcaggagtttgagaccagcctggccaacatggtgaaaccccgtctctactaaaaatacaaaaattagctgggggtggtggcacgtgcctgtaatcccagctatttgggaggccgaggcaggagaattgcttgaaccctggaggcaaaggttgtggtgaaccgagatggtgccactgcactccagtctgggtgacagagcgagactccatctcaaaaaaaaagtatatgcaaagcttggcattgaaaggatatggtgaggttgccaggcatggtggcttatgcctatactcacagctacagtggggtagattgcttaaggccaggagtttgaaaccagcctgggcaacatagtgagatcctgtctttaaaaaaattaaaaacaaaaattagctggccatggttccacatgcctgtagtcctagctaattgggaggctaaggcaggagcaccgcttgagcccaggagtttgaggatgtagttagctatgattgtgtgactgtactccagtctgggtgacaagagtaagaccccatctctttaaaaaataaaaataaaaaagggtatggtgagtttgaaaaacagcaaaaagcagataaagcgaaaatgattgtagttgatagaagggcagcatggaggatgaaaagagtagaaacagactggagacaggaaagccaggtaggaggcagtctctgtaattaggcaagaactaatgagggtgtggactaaggaagaaacagtggaaatgaagacaagaagctgaactcacagaaacattttggaggtcacataagcaggattttgacaacagattcgtttgttgtatgaagatcctggactgaatgaagtctagggtttgggagttttgaagggataatgacccattaaatgagctggcaaatacaggtggtaaagcaggtctgggatgttcagagaagggtgggaacacggaatggatgccagaagctgggagaaaagccaagttcatgcctgtggaaaaatggaattgaggatggggctaaaattggacagaggaaacttaatctgtaatgtttttcttcttttcaaaaataacttgaagtggttgtacatatctggtgtgatatacacaaatgcttaatttctctatttttaaaaaacttcccaaaattagtgcttggaattatttaaaataatgtagcaaacatttttggagtgcctgctatgtgtctggcactgtttcaggcatttgaaatatttgctctctatgaagccttcctttcagcagttagcaggcctggagttcagaagccagaaactggcttctgattctgacgcagtcagtaagtgtatgacctgggcaagttgcttccctgcggcgtcccacgcccccaaaaccccccacccccccacccgtgccaggaatctatcgcagttctcaagtcctgtgacttaataccgcagctggcacctcagaattccttattcttacagagctggtccccacagtaccgcccctgggcgtaaactcctccatacagggagtgtagatgatgggctgacctaagaacggtttccaaatggtcctttacacctctgcctcccaccccactctagcccaggataacagattttcctcgcgcaatttcaaatttgcaagggaatcttgaatattttctggtaatgagagagggtagattatatgtcctaatcccagcctaatcagattaacagcaacttctggacattcagtaccaggaactgttttaggtgctgtggagagaagagttaaaaatgaaacaaaaattattgccttcatgagcctcacattagtggacagagtccaaaaaaaaagtgacaacgtaatgcgctactgcgacacaaagcaaagcaaggtgggcaagcaacactagttctttattcccgcacgccctaatccccaagtagctcttccgggtcactgcagtcttcacgggctccagactccgcccatggtccgtccttcaggccttgactccgcccacgcatcgacgtagaatttcccggccgggctccatgaagtaccacccacccgcgacgccgacgcaaggctgctgctatggggccgggcggccgtgtggcgcggctgctcgccccactaatgtggcgcagggcggtttcctcggtggcggggtccgcggttggagccgagcccgggcttcggctgctggccgtgcagcggcttcccgtaggagcagcgttctgccgggcttgccagaccccaaactttgtccgcggcctgcacagcgagcctgggctggaggagcgggcggaggggacggtcaacgagggacgcccagaatcggacgcggcaggtacgggcgtggagaagaacgaaggcgaccctctccgggcagtctggagtcaggtcccagccaaggtggctctgggttcccctctatgtgcatttctcttggagtcacaaaactcctgcacatccagagctggaagggacttcaaaggttgttggcgccaaccttcccgtttcacagtgaagaaattgagggcaagagatgaactgcagaatcccagcctcccggacggccatctcccacccttggcatcacagtctcaccgtcctcacttccttttaccctcttcctaggatcctgggaaatgggtttgtggggactgttggggcttgaggattctgaggagccagggtctgggtgcgaaggggtgcgtaggaagcgccagtaggagatgggtccaagttaatatcctctagttattgctgacgtttttagaaacttaagaatggtaaacagatcacatctaagaatgtagagtatgagagggagaggccttagtgggcttagctactaggtcctttggagtcggctttagaacttgggcgagcttttaaatttacagcctgtaatactccaagctgaagatcagaatatctaaatctttacgggaaaaaaaattagattttcataggtaacagttgttaataacccggtggttttatatgaaaactggaaggttcaaaataataattactcaaaaatgtagctctttcagtgactgatcttaggccacagtaattctcctaggcctcagtttcttcatctctcaactgaaggttgtggaccagatactgcctaagagcccttccagctcacaattctgtgacccgttatgactgagattcaatttaatatgctccaggatatcacctcctacccattttgtggtgctgtttttctttgcacagcatttctgtgattgtggtgtattgctccttttaagtattagtagaaagtcatttgtcactggtgtctggttctacttgcatatggttaatagcgaaggatgtatagtggctctgcgtaatctgagcaccctgaccataaaagttgagcggtgctatgatactactgcccaggttcaccttccaggaggcctttaccctgctatctgtaaaaacactttggatctaaacaccctcatggaggaacagtcagctgccggcatctctgggtgcatacacgtctatctgcttggccatcctgatacaaacaactatttgtgcatttcagatcatactggtcccaagtttgacatcgatatgatggtttcacttctgaggcaagaaaatgcaagagacatttgtgtgatccaggttcctccagaaatgagatatacagattactttgtgattgttagtggaacttctacccgacacttacatgccatggccttctacgttgtgaaaatggtaggatgctttcttttctcttttggaccattaactgagtggaatagtgacagtgcatcaggccaaggagcaacacttagagggtaaacccatcatacaaagttacagaagaagcccaaattttcagaatttgcatgaattcattttatgttctttgatagtgaaacatatgggagcaaatatccagccctattgagttaggatatatcaaaatcttttctcttgtgaccgcaaggaagattttttttttttttctaattgagatggagttttgctcttgttgcccaggctggagtgcaatggcgcgatctctgctcaccgcaacctccgcctcccgggtttaagtgattctcctgcctcatcctcctgagtagctgggattacaggcatgcgccaccaggcccagataattttgtatttttagtagagacgggtttctccatgttggtcaggctggtctcaaactcctgacctcaggggatccgcctgcctcagcctcctaaagtgctaggattactggcatgagccacctcacccggccggaaaataatattttataacctgaggcaagctagaagacagtataaccagagggatttctagaggcactatccattacggtagccactagctacatgtgcctatttaattataaattaaaatataaattcagccgggcgtggtggctcaagcctgtaatcccagcactttggaaggccaaggtgggtggatcacaaggtcaaaagatcaagaccatcctggccaacatggtgaaatgccgtctttactaaaaatacaaaaattagctgggcatggtggcgtgtgcctgtaattccagctactcgggaggctgaggcaggagaatggcttgaacctgggaggcggaggttgcagtgagctgagattgtgccactgcactccagcctggtgacagagccagactctgtctcaaaaaaaaaaaaaaagatataaattcagttctgcagttatattagctatatttcaaatgctcaatagccacgtgtggctaatggctaccatatgggacagccataaagcattttcatcattgtaaaacgttctattggacagtgctggcctggagtttcattcaaagatttgagcatgtccagtgttcccaagcactgtacggggtattgggaaggtaagaacaaaaaagatgtagtccttgcccttacaggtctagttgaggaaagaaagggggattgttttccagttgcactgaatatgaatcagaatgaggaagaaagtacttggaagcctctagctgactctggtaccattccacggggccatgatacctttcttagtcttagtctgttgagaattggtcatagaggaggcagttaagaccaaaagagtagccaaaattgtatagagaaaggttgtaaaataaaaaggtggggcctatacacaaaaccctggtacatgacagagcagaagaagatgccaaaaacagggtaattggagagatagggagagaactaggaaagcataaagaagagatatacaaagacagcataccagggtctctatcagatgtaatagtgggatggagtcagaagacttagtgaccattggacttgcggatgtaaaaagaatgggaggttttacagagaagtttctgtgaaagaataaagaaatagaaattgcctttacaaagattttagatgagagaaatgcaaaggcaagaaagttttgttgtttgtggtaaaatatatataacgtaaaacctaccgtttaatcttttttttggagacaagagtctcgctctgtcgcccaggctggagtgcagtggctcgatctcagctcactgcagtctccgcctcccgagttcaagtgattctccggcctaagcctcctgagtaggtgggattataggcacccaccaccacgcttggctgatttttctatttttagtagagatggggtttcaccatgttggtcaggctggtctcaaactcctgaccacctcggcctcccaaagtgctgggattacaggcatgagccactgtgcccagcccatttaacaattttaaactgtgttgttcagtagctttaagtaccttcacattgacttacaatcattaccaccatccgtctccagaaattttttcattttgcaaaaacgaaactctgaactcattaaacaataactccccatttctccttccgtaggcagctaccattctactgcctgtctctatgaatttgactacttttcagtatctcataaaagtagaatcatagatttgtgaccgacttatctgacttagcataatgtcttcaaggttcatccatgtagtagcatgtgccagaatttccttctttcttaaggctgaataatactctatcttacgtatataccacattttgtttatccccttattcattgatggacacttagattgcttccaccttttggctattgtgaataatgctggtataaatatgagtatagaaatactgttcatgaggctgggcgcagtggctcatgcctgtaatcccagcattttgagaggccaaggtgggcggattgcttgagctcagaagtttgaaaccagcctgggcaacatggtgaaactccatctctacaaaaaagacaaaaaataaaataaaaaattggctgggcttggtggtgtgtgcctgtagtcccagctacttggaatgctgaggtggaggattgcttgagcccaggagcttgaggctgcagtgagccaagattgtactactgcactccaccctgggtgacagagcaagacgctgtctcaaaagaaaaaaaaaaaaaaaaaaggctgggttcacacttgtaatcccagcactttgggaggccaaggcgggtagttcacctgaggttaggagttcaagaccagcctggccaaaatggtgaaaccctgtctctattaaaaatacaataattagctgggtgtggtggagggttcctgtaatcccagctacttgggaggctgaggcacgagaatcgcttgaacctgggaggtggaggttgcagtgagccgagattgtgccactgctctccagcctgggcaacaagagcgaaactcagtctcaaaaaaaaaaaaaattgtttatgtccttgcttttaatgctttggggtatgtgcaaagaaatgggattgctggatcatatagtgattctgtttttaattttttttctgttcaccagcctagcacaaagctgaatgtttttaattttttgaggagctcctgtattctttcatagtggctacaccactttacatttctctagcagtgcagagtttccagtcttcacatcctcatcaacaacttattttctcattttggtaatagccatcctaatgggcatgacgtgatatctcattgtggtttttatttgtatttccctaaggattagtgatgttgagcatattttcttttgcttattggccatttgtatatattctttgaagaaaagtcctttgcttttttgtttgttttaaagagacagtgtctcactttgttgcccaggcttcagtgcagtggtgtggtcatagctcactgcagcctggaacttctgggctcgagtgatcctctcacctcagcctcccaagttgctaggactagaggagtaggagtagtcaaattcatagagacagaaagtagaatggtaggagttactccacagtgcccagctaatttattttttatagagacagggtctcactatattgcccagactctttgcccattttaaaatcaggttgtttgttgttttgttgttgagttgtaggagctctctatatattctggatattaatcccttatcaaatatgtgatttgcagatgttttctgccattctgtgggttgcctttttactctttagagtgtcctttgatgcacgaaagtatttaattttggtgaagttcagtttattttttcttctgttgcctgtgtctttggtattatatctaataaataattgccaaaccagtatcatgttttccctattttcttctaagagttttatagttttaagtctcctgtttagatatttaacccattttgagttagtttttgtaggcggttagttttccatgtggacatttcctcagcaacgtttgttggaaggactgtcctttgtgcattgaatggtcttggctccattgttgaaaatcatttgaccataggcacaagggtttatttctgggctctgtattctgtttcatcagtctgtgcgtctgtctttttgccagtttcagactgttttgtttaccatagctttgttctaagttttgaaatcaagaaatatgagactccaactttgttcttttacaagattgttttggctatttggggttccttgagagtccatataattttttttttttttttgagatggagtttcgcttttgttgcccaggctgtagtacagtggcacaatctcggctcacagattcaagcaattctcctgcctcagcctcccaagtagctgaggttacaggtgcccgccaccatgcccagctaattttttgtatttttagtagagatgaggtttcaccattttggctaggctggtcttaaactcctaacctcaggtgatgcacccgccttggcctcccaaagggctgggattacaggtgtgagccaccgtgtctggccccacataaagtttaggttggatttttctgtttcttcaaaaaatattgtgatcttgatatagattgcactgaatctgtagactgcattgggtagtattggcatctttacaatattgtcttcccatccatgaatatgaagtatctttccatttactggcatctgtaagttctttcagcagtgttttgtagtcttcattgtacaagtcttttgctcctgtggttaagattattctgctaggctgctcacggtggctgatgtctgtaatcctagcactttgggaggccgaggcaggcagatcacctgagatcgggagttcaagaccagccgcaccaacatggagaaaccccgtctctactgaaaatacaaaattagccgggcgtggtggcgcatgcctgtaatcccggctacttgggaggctgaggcaggagaatcgcttgaacttgggaggtggaggttgctgtgagccgcgattgcgccattatagtccagcctgggcaacaagagcgaaactcaaaacaagaacgtctcaattaaaaaaaaaaaagtattattctgctattgtaaatggaattctaaaaactttgtttccaggttgctcattgttagtgtatagaaatacgatggatttttgtgtgctgaatttgtttagtagccctaactgggttttttttgtggaatctttggggttttctacatatgaagttgtattgtcttcagagataattttacttcctcctttccaatttgggtaccttttttttttttattgacgaattgctctgactagaacttccaatactgtgttgaatagaagtagcaaaagcaggcatagtcttgttcctgatcttacaggaaagctttcagtctcaccattgaatatattagctgtgtgcttttctcacatggcccttattatgttgaggtaatttccttttatgcccactttgttgagtgctttattgtgaaagggtattgaattttgttaaatgctttttctgcgtcagttcagattatcatatagattttttcttcattctgttaatgtggtgttattgcattgatccgtttttatatgttgaaccaccttgcattccagggataaatcccacttggtcatggtctataatccttttaatatggtgctgagtttggtttgctagtatttttgttgaggatttttgcatcaaatgttcatcagggttattggtcttatggaatgagttaggaagtgttccctgttcttcaattttttggggagaatttgagtattgcattcttgtttaaatatttggtaaaactcatcagggaagccatctggtctaggacttttgttgggagatttttgattactgatccagtccccatactagttatggtctattgaaactttatatttctgcatgattcagtcagtagattgtgtttctagaaattttgctatttcgtctaggttacccagttgtttggtgtacagttgctcataatactcttacaatcccatttctctaaaatcagtagtgtcacttctttcatttcagattttagttgtcttttttcttagtcattctaagaaccaaatcctagtttcattgattttgtctttttcctgccctaattatcatttcctttgattttggggtgatgtatatgagatgtcctttgtctcttgtaacagtttttacttaattgccatcttgtttgatattagtatatctgttttaacaaaagaactgagcacatttataggatgacggggtcccattaacatgtcataaaggcagatgagatgaaatcagtggcactgaaacaacctggctttataaacagaaggtagtatctgcagcccctaaaggtgaaggaaagctgggatgaacacaagtgatggatgtaggtgggtaccaaatgctgactgagcttagctttttcagcctcagaggcaccttggtgaatgaatggggtgaccctctcagaagggctggggcaggagaattcaggagagaggtgaaagtgaataagatttagagggagaaatagtttccctaagttattcatcacagggcaaagtatagcaatgagaaatgagtaagaaagattaaaaaaaacaaacaaacaaacaaaaaaaaaagaccttcagcaagaacaggcttcccccatcccctctccctttaataaaccacctggctttttgcagtacaaacacctgaaatgtaaacgtgaccctcatgttaagatagaagggaaggacactgatgactggctgtgcgtggattttggtaagttattctggcgtattttacaggtaactgttggtactacgctaatcttgaattgttttcagttgcaaaaggattgagatcaaattgatgaatgtatttccaggtaagatttttgaagtgtgtttaaggtaacaaaagtttttttagttataatccaggtggtcttattcacatgtagaattttcacctaaccaaaccaaagtaccctagatgatgccctcctggaggaagatatatactacatggtgtgtatctactagccacacagatcaggaaggtggtggacaacaggataacatagtagaggcgggagagattccttagtagtggtagaggaaggtttgggggctgtggtgcataaatgagatgaggatgaggttattccaggcacaaaaaaggacaagagcagaagactagaattttgaaaagatctaacaactttgggtattaatgtgtacatagtttcaaagcacctcccaacaagataatatttacaaaggggaaacataactgtatgtcaagaactgaggagtctgagattttattctgcttgtaagctaatacattgtcccgccagttttcatggacactggtaaaagacaagactattagagggttagagacaaagaacagtttattactcacagcagtagccagcatccattttgcactggtttcctgagctctggattccatagggcaacatgggccagatgacaccagcacacacagttgtaaaactggaactcagatgagggtgtctaggttttttataactggcaggaagcaggcctacttttgctctgatggtttctcacttttgtcgctattaacgttttggaccaggtaattttgcatgtgggggaggggtgtctcttgtgcacggtacgatgtttagcagtatcctcccttctccaattgtgacaatcaaaaatgactctaaacattaccattattacctaattgagaaatgctgctgtaagcaaagctgccctttgccctggagggaggcagtatctttctgttaagaatattcacgatacaaacattcttggatagtcaaaacaaaaggcagtcagtgtttttgcacaaaagatgtgcagaagtgtgttacccatggagaattgtcaccgaagagaatcctgacaccattagtctctttgataaagttactatcaccagcaatgttatatattgacatatgcctcctgtaggtacactgagaaaggcatagcatcacttctgtggtatttttgctgggatggagtccacagtgatgctaatctgggaaccacacttgagaaccactgctttattcctagagttagccagtgtgtgttgtaaggtaagaataaaagcaaatgaactattccttcattgtatctcttatctgtccctgacaggcagcatggtgattcatttgatgcttccagaaaccagagaaatctatgaattagagaaattatggaccctacgttcttatgatgaccagttagctcagatagcacctgagacagtacctgaagacttcattcttggaatagaagatgatacttcatctgtgactccagtggagttaaaatgtgaataaaatattttatgcactgcgttagtcatttcagatttggattgagtcacttattggaaaatacagctcctaaagtccgtctccttggttaggctgctcttaggacaaggcttgtgtacctcatgggcactcctgctaactggcatgcagagactgtcgataagtgagctatacctgcaaccaaaaatcagtacattctacccaaaacttatgacacgctgcctttatcctggaaatgtcatcagaatttcctggagttagcactggctcctgtgcttgacttctctgctcagatttttattaatttaatttagcttaaatgtaaatcttaaccctgtttgtttaatggaatggcaaaaattttaaaaaataatataaaacatagcccactggtcttatttttatactttgaggtgataatattcttctaggaggacttctgtaacccttccagaatactccagtaacacaagaaagtaaacaaagtgtttgttaggaaaaactctgaacgctctagttcttagttcatatgcaagagtattatcaaggttcacattaagtaccatggctggacatggtataacagaaatctgcgtagagtttgaaaaaaaattcagaacattcccattcaattgaaaaccaaaaataaaacatactacacaacaagctgcacctaaatgatgaaaaaatttattctgcgtcaaggtatctggaaaatgaagctgcatttggggcacattatacatgaggaatgatccatatatggtgagtacaaaactcaattatagaattatttcttagctagtaccagatactccaaattacaaatgcttaagtaaaagtaaaatatgatttgccatactaaaaggctagaagtgaaatatgacagaatttaaaccagcagatataaatgcagcacctatgtgtatatttttaaaaaatcaaatattggggaaaaaaatcaaatactgagaaaagctctggccttaaacacatcttacctgaaatccaaccagaaagccagtccatgattttagcaattttaattcattgtatgaaaaaaaaatcatgaatgctaggagaatccagtgacaaaaagggcacttttttggttaaaactacaaaagaaacttgttttcagagaacattaaggaaaacactttaaatcattttcaaaatgtctaattgatcttcagaaaaacatctagtctgtatagaaattcatcttgaaataagaatgaggcagtgattttttttttaaagggttatatatatgtcctttagatcagtgtaacatgactgtgatcatcttacaaacaaaactcaaaaaatcaattcagagagcagcgtggccttggagaccacccacacccaacacaattgtacgtactgggctttgctgtcaaggagtgagcaaatgagttcgttatcaaaggtcatatgttttcacagtcattcaaattatatcccaaaaacttttcttgtattctctatcttttgacttttttttcaaagaactgattgcacagtatacagaaatcctgttatactttactacttaaggtggagtctaattttttttttttaatttatcagtgcttaaaaatcttcaaaatagcttagtgaggctcatgacagtgctggccccatggaaatgtagccttttgttgcgtttaaacactgtcacaccatctatgactgtcccattggtctgaagtgtagtggcaaactaagcatcctataagacaagctaaagcttgctttttgccagtcagttgaaagtcttgcatctcttcactgatgcactttctttaggtattgatagtcagaagcacaaagcatttattatgcattcaatcatgtagctaaacaaaaaactgaagtctcctgaagccatttaaaccagccgttccaaaatctcctgcgaccactttgttagtaccgtcaaaaactttcccaactataaatgaaagaataaatggtagtgctgctctccagatactaggcactgctccgtatttttgaacatttgatttaactaataactgtgtcaaaagcctcaaaaaaccctgaaattaattttccagctttactgtcaccagccagaagtaaaaatcttaatttgcctgttagctgattgctgttaaattttaaatttattttttaaaaaacggttggacttctatcattataaagtatataaaattttcaaaaaaaaggaacaattttgcttttcattgtattactgaatacctgaggtagttgagtaaaaatgcacgtttaatacccctgccaacaccattcagcacttcccttaggttactcatgttagtgttaggtaaaaataaaactgagaacagtttttctatgctaatggcttaacatttaagttcctgtgataattattctgatccaattttaacaattggatttaggagcaatctatttgatgaatttagtgaaagcatcattaagccaatttctggcattatgggggaatattaagaagaattagaatatctgttatactgtgagactacaacaaagggaagtgcagagctcttctctttccctccctcccccaccctttttttgtttgtttgtttgtttgttttaaagctgggtgtcatacatttcagagagcataaagtatacattctcacagagacaggagttcaaaagttgcctggtcctcagaaacaactggctaggtaaaaacttgtgcatgtgattctggatagggggtcagcgcccatctgttggttaagcaatctgtctttggtttggcatctgcctctgtggtgggctgtttcctgagcctttacttccgtcttgactgaggtggtccactttgcagagccttctgttgttggtgctgctttacctgagtcagaatttcctgaatttttctctgggcaacctagaaaaggacagagctttgaaattccacttgatcaaaagctactaaaagttattgtactccttcatttcaacaatttcaaatagaaatccatttgatgattaaagatacatactagtcagtttgctagtagtctctgaaatcacccgctaaaagggagatgaaaagtcttaagcatcaaacaaccttaactaattctatcaggtaggagcacctgtgggagaattgcttccacgtgagaaagatacaatagcttattttagagcccacttgcctggcaagcatagaagtgaccagttattttgacaaccacttggtcattctcatcaggtgtctggtcacgagggacaacaacttctgcacttgacaaattctgaagttcattcacctgaaagagataaatataaatcacattaagtggcagttttaaaaccttacttcctaagcacttactgtgcgccagacagtgagctatgtatggctttacaaatttcatttaatccagtggtaattccatgaggttattagaattatccccacttcaagatgattaaggctcatccaaagaaactgatttgtccagttatacaagtgaatggcaaaaccagattcaaatcctgagtctgattccaaagtgtatgtactcaatcacttcaaaattataaatagctttgaaacccacttacaagttatatgtattagagactagaaacagtttgctttttttccattacagatgtaacaagctgtagatgaaatttttaaaattcctgttaagtgtctgttccataaaaagctaaagttttatcaggagaacgttaaatgccctttataaatataggacaatcctctcacacaaagtgatctgaaagagatgcattactttcactaatagctggcaccaacactcagacaggaaacaaaaggcaatcttctccaaaccttggtcaagatggtcctgctttttataaattagccaaaattcggggacttggaactcctaagtacctttcaacgctttccctttcataccactgcacaggttttgctgaagtacttgccgttttgcctccttttccaataactctgccagcagcaaaggatggcactctgatatgagcttcaagtttcacctcttctttaggactaacaaagttttcttctttaatttttccataaattcttccctgagcctgcagatgaaaacacatcctattagtgtcattcatgtatgaaatggaaaaggtcagttaacttgaaagatggcccaaatccaagtgggatagccctttgcagtgatacatctacatttcatagattgttgaaaataacatagaagagagcagttagaagtcctaaaaggttgacaataactactgcccatcacagtagaggcaactgaatgcttggtgaaagaaggataaaccatattcttctgatgaaaacagttaaaggcaattaataacctaataaaaacgaatttttgtgggcaaatggccattcgtactaaaattgtgataggtaaaacttctcatgctggccatgagacatcagttgcatttttctttcctttttgttggagtcagggtcctcctgttgtccaggctggagtgcaatggtacaatcatagctcactgcagcttcaacctcctgggctcaagcgatcctcctacctcagcctcctgagtagcagactacaggcatgcaacaccacacctgacttattttttttttttttttgagacggagtcttactttgttgcccaggctggagtgcagtggcacgatcttgggtcactgcaacccccgcctcccaggttcaagtgattctcctgcctcagcctcctgagtagctgggactacaggcactagccaccacacctggctaattatttttgcatttttagtaggcatggggtttcaccatgttggtcaggctggtctcgaactcctgacttcaagtgatgtgcccacctcagccttccaaaagtgctagaattacaggtgtgagccactgcgccactaatttttatagagatgggggtcttgctatgttgccacgctcatcacaaactcctgggctcaagagtcctgccttggcctcccaaagtgttggtattaccagtgcaagccaccacacctggtcacattttttttgagcaaaagagacagaactgcagagtcagctatgccaagctcactaaaagtcaagctcacatctacatgggccagttagaaacctgctgagaaaaatgttttcaatttaaatgtgtttcatactcttagaaaggtggtttttcctttgaatattttaaagaggctacaacatcaaggtaagacacttttttcttttttgagacagagtctcaccctgtcatgcaggctgaagtgcaatggcatggtttcggcttactgcaacctccgacccccgggttcaagccattctcctgcctcagcctcccaaactagctgggattacaggtgcccgccaccacacccagctaattttttgttgttattttagttgagacggggattcaccatgttggccaggctggtcttgaactcctgacctcaggtgatccacccaccttggcttcccaaagtgttgggattatgggcatgagccactcactgtgccctgccttttatttttttttatttttttattttattttttttagagacagagtctctttctctgtggtgcgatctcagcacactgcaacctctgtctcctgggttcaagtgactctcctgcctcagcctcctaagtagctgggattacaggcatccaccaccatgcctggctaatttttgtatttttagtagagatggagttttgccatgtaggccaggctggtctggaactcctggactcaagtgatctacccacctaggcctctcaaagtgctgggatagcaagcgtgggccaccgcgcctggccaagacacttctgatatttagagtcaatacatcctatcacctactgcatgcaactatataaacaacctattatatataaacaacctattacatacagcaaagcagaaaggagcctgagagttggtttgacaagctgccagggtaaaccacaaaaaacaatagtacccaacacgcgttcactgattcagaaagctgagctcattttagggcactaccgacaaaacaaaattcatcttgataccctatattccaatgatccttaatgcctcaggccaatgacgtagatattactattacttaagacagtcaaaaagacactagggatatacactatcctccaaaactgaagctcttgaatttgtaaggaaaaatacggggtaggtggtttaccattccttagatctctaaagtaaaacattcatttagcattgtcaccaatcacataaataaaatttaactactatggcttaagtgttacatttaagttaactataaaacatgagttttattagtgaatacagggaaagaactttgaagttcctatcatacaaacatcataggagttgcaggacagtaattctacttataagactaaaagctcagcaccaaggaaagacatgtttgtatttatcttttaagatttcaaactaaaagtgaccctgagagtttgggataggaagcagttttcaacaattctgagttaagatttgaactgcctggatcacaaggctgctgtgaaggaataaatttcttcacatgattttctttcttcacctaaccacccacatctcaaagcacctccttcgtttcccattcttcacataagtgaaagcagctttgggtttttagtgaaaaaatggcccagagaaaatagaagtcaaagaaagtgattttttttgtttgatttaagggagagaggtggggtggggagagaactgtatgcactgttactagttactgttacactttaaggctaaaaaaactaaggcttggccaggagcacagtggctgatgcctgtaatcccagcactttgggaggctaaggtgggcggatcacttgaggtcaggagtttgagtgtgtggccaacatggtgaaaccccatctctactaaaaataaattggctgggcgtggcggcacatgcctgtaatcccagctactcgggaggcggaggcaggagaatcgcttgaacccaggaggtggagtttgcagtgagctgagatcacgccactgcagtccagcctgggcgacagagtgagactctgtctcaaaaaaaaaaaaaaaaaaaagagaaaaaaaaaactacagcttaaggttaaatagttgtcttcttacacagccactaaatgttctaagacaagacacccatactaaattttgtgggagaaatcatacactaaaaggaatatatttatgaatttggcatggtcttagtctgattcatccatagtctgttgaatacccccagcacgctaattttgtgctgcccatgtgttaggcacttttctaaacatttcatatattgtgtaaaccttaaactaccttaggatgtaggtgctcttatccctggttttacagaaaaaggttaagtaacttgcccaatgtcatacaaggcaaatggcagagctaggatttgaactagcagcctggctgccaagtctcagctctaccatctctcagtagacattgaaaggcacactgcagccccaaagacctcaaatcccactaaacgtgcaatggttcataccagaacaaatgctacaagagctcctgccattcctatctctaagatcccagggattagagagatttgtagagtctatgggcagggtctaacagagataatccaagggtaaggaaaaagggggcattttaattcaagtctaggcaatctcagggacaggagggaaaacatctgaaaacaagtttccaaggcatattaacctggcaggtttgtaaattttaaggtctcaccttagcataggattacaaaccattaagcaaaattaacctttgagagacaggtaaatccagcaaccagtacagaactcttaaaattaaagacttttggttaatttcgaaatataattttgagtgtgattctactcagctcttagataagaatttccattgactctttctgagatttagacatatttaagggagacgccaggttatggactacctgtgcatttgttacctgtggacatagcacatactctagagcacataccttgaactgagcctctggtggtccagtgataatcaccatcctcactttagcatctggtgcttccgctggagcaatctgtaacagacccaacaacaagttatgatactttcaggtatcactgataggcatcttgggccaaccagcctaacatttgcatgtgactggctgaaatgcagaattaaagccttcgtgaaggaaattagggagaggcagcaattcctgtgggttcacaatttaggcctccctcctgcatatactatatgcttattctgtgccgggccctaatggagacctccacgtgctgtctctcagctaatcctcaccacgtcctgatgaagtagtattacctccacttcacaaatgcggaaatggaaggctggagaaattgagttatctggaccatgatcacacagctaacagagctagagggagagctgggtctgtctccattgcctgtgttcactacaccagtggtgctcaaagtatggtccttggcccacttgcatcagggctccttgggcttcctgtgtatgcaacacactctaggaatctctgtaccctaagtttcaaggatactgcacaccacatgcctttgtttgtctgaggcagggtcttactgtgtggcctaggctggagtgcagtggtgtgatcatagctcactgcagcctcaaccacccaagctcaagtgttcctcccacctcagcctcccaagcagctgggactacaggtgtgtgccaccatgcctggctaattacacttttttttttgtagagatggggtctcaccatgttgcacagtctggtcttcagctcctggggtcaagcaatttgcctgctttggcctcccaaagtgctgggattacaggtgtgagccaccgcacctggccaacctttattttccttaaataaggcatcaaaatacagaatcttcagaacacacagttatctattacggcagacaccattatttgtcctctggtatgttaccttctgtagttacaaaatgtttagctgactgtgcatagcctgtattttgccccttcaacttcgtctggccaagttctgggcaatggaaatataggtagaaatatcccacagtagctaacaagaaacctccctagaagaaaagctctttattatgttctcctctcctactggctgggcaacagacctgattcctggagcactgaatggtgtcaatctggaaccaagagggaccaaggccgtacctggggaaggtggcttggaaggaacttaggtccaaggacttggtgggggcagagccaacacccagcccggatgttcacctcctaactgtgttttctgcacagagaagttagcctccttggtgtaagccactgttgtttgggggtttcttcatatccttatgtaaccctaacagtgtcttttacattctattcaaattataaagtggcaagaagattcatatttctgtaacttacttaaagaaccagagaaccacagctggtagaacagtaccttaattgaagctccagcaaagcgagaaagctgcttgatgtgctggccctgcttgccgatgatggcaccgactgatagagctgggataaacagatgaacagtctccgtttctgattgctgttagaaaagaaagccaggacacccatgtttatttgctacaaatcaggcttttgttaacattagctttaggaaggacaccttctcatgcagtaggaataccaggaaagtttaaggaaaagctaccataagaagttgaccagaccttacctaataggtcaagaagatctcatacagtcatcctgaaaacagtggtatttaaaatttcacttttctctactgttgccttaaactttaaaatgtcactgagttatggatttaaaagatatgtagatgttgtaaagtttaatcatattagaatagcgggacatgcttgcattaaaaattaagtaagagccccctaccactctcaaggtagattcttaacaagtaaatgaaattctgggctacatatcaaacacaacagaactcaaggacgccagctccacaccttatctatgtaggtttcactccttaaacacatacacagtgaagtgtttaagagaaaagctgaattttgttacatatgactaaattgtatgaaaccttaccactgtcattcaatagttatcacatccaagcacaggacaggattaggagagagctaattcactttagtggtaagatgccctaagatgctttcccacagaattccttattccttccatctgtgccttccctttgctttttttttgagatggaatctcactcttgttgcccagactagagtgcaatggcacgatctcggctcactgcaacctccacctcccggattcaagctactctcctgcctcagcttcccaaggagctgagattacaggcacttgtcaccacacccggctaatttttttttttttttgtagagatagggtttcaccatgttggccaggctggtcttgaactcctgacctcaaatgatccacccgccttggcctcccaaagtgctgggattacaggcgtgagccactgcgcccagccccctttgcattttatacatgaaaaaattagaaaatattttgtaggctaactcctgaaaggtcattcataaatagattttatctatgtacctcattccttcactacttcccacttcaagccagttgtgcccttcctgggtctcttttcaaatagtccttgcagggataaaggacacatttgctcaagagttcacagtgactgggctcctaaaaaggccaattcaaggttcaaggttcagtaatgctaccagtcaactaacagttctaaagtacagaagcagtgcacataatttatgcattttccactttgtttaccttctaacaatatagtgagaaaaacacttccaaggataagctagttccaagacacatattacaagaaatagttattgaaatgagccacaactgaagaagccagtaatatgcttttgtttaaaaaaaaaaaaaaaaaaaaaagccaggcacagtagttcatgcctgtaatcccagcactttgggaggccaaggtgggtggactgcttgagcccaggagtttgagaccagcctgggcaacatggcaaaaccccatctcttcaaaaattacaaaaattagccaggcatggtagcgcttgcctgtggtcccagatactcaggggaggctgagatgggaggatcacttgagcccaggtggttcaggatgcagtgagctgagatcacaccactgctctccaacctgggtgagagtgaaactctgtctcaaaaaaaaaaaaaaaaaaaaaagaaaaaacaaaaaagaaaagaaaggaaaaacccagtatgtatacccaatcagcaaatgtttctagaaatattagaagatattttgtcgggagggaggagccaagatggccaaataggaacagctccagtctacagctcccagcgtgagcgatgcagaagacgggtgatttctgcatttccatctgaggtactgggttcatctcactagggagtgccagacagtgggcgcaggtcagtgggtgcatgcaccatgggtgagccgaagcagggcgaggcattgcctcactcgggaagcgcaaggggtcagggagttccctttcctagtcaaagaaaggggtgacagacggcacctggaaaatcgggtcactcccacatgaatactgcgcttttccgacgggcttaaaaaacggcacaccaggagattatatcccgcacctggctcggagggtcgtacgcccacggagtctcgctgattgctagcacagcagtctgagatcaaactgcaaggcggcagcgaggctgggggaggggtgcccgccattgcccaggcttgcttaggtaaacaaagcagccaggacgctcgaactgggtggagcccaccacagctcaaggaggcctgcctgcctctgtaggctccacctctgggggcagggcacagacagacaaaaagacagcagtaacctctgcagacttaaatgtccctgtgtgacagctttgaagagagcagtggttctcccagcacacagctagagctctgagaacgggcagactgcctcctcaagtgggtccctgacccctgacccccaagcagcctaactgggaggcaccccccagcaggggcacactgacacctcacagggccgggtactccaacagacctgcagctgagggtcctgtctgttagaaggaaaactaacaaacagaagggacatccacaccaaaaacccatctgtacatcaccgtcatcaaagaccaaaagtagataaaaccacaaagacggggaaaaaacagagcaaaaaaactggaaactcttaaaaagcagagtgcctctccttctccaaaggaacacagttcctcaccagcaacagagcaaagctggacggagagtgactttgatgagctgagagaaggcttcagacaatccaattactgtgagctacgggaggaaattcaaaccaaaggcaaagaagttgaaaactttgaaaaaagtttagaagaatgtataactagaataaccaatacacagaagtgcttaaaggagctgatggagctgaaaaccaaggctcgagaactacgtgaagaatgcagaagcctcaggagccgatgtgatcaactggaagaaagggtatcagcgatggaagatgaagtgaatgaaatgaagcaagaagggaagtttagagaaaaaagaataaaaagaaacgagcaaagcctccaagaaatatgggactatgtgaaaagaccaaatctacgtctgactggtgtacctgaaagtgacggggagaatggaaccaagttggaaaacactctgcaggatattatgcaggagaacttccccaatctagcaaggcaggccaacattcagattcaggaaatacagaaaacgccacaaagatactcctcgagaagagcaactccaagacacataattgtcagattcaccaaagttgaaatgaaggaaaaaatgttaagggcagccagagagaaaggtcgggttacccacaaagggaagcccatcagactaacagcagatctctcagcagaaactctacaagccagaagagagtgggggccgatattcaacattcttaaagaaaagaattttcaacccagaatttcatatccagccaaactaagcttcataagtaaaggagaaataaaatcctttacaggcaagcaaatgccgagagattttgtcaccaccaggcctgccctaaaagagctcctgaaggaagcgctaaacatggaaaggaacaaccggtaccagccactgcaaaatcatgccaaaacgtaaagaccatcaagactaggaagaaactgcatgaactaacgagcaaaataaccagctaacatcataatgacatgatcaaattcacacataacaatattaactttaaatgtaaatggactaaatgctccaattaaaagacacagactggcaaattggataaagagtcaagacccatcagtgtgctgtattcaggaaacccatcacgtgcagacacacacataggctcaaaataaaaggatggaggaagatctaccaagcaaatggaaaacaaaaaaaggcaggggttgcaatcccagtctctgataaaacagactttaaaccaacaaagatcaaaagagacaaagaaggccattacataatggtaaagggatcaattcaacaagaagagctaactatcctaaatatatatgcacccaatacaggagcacccagattcataaagcaagtcctgagtgacctacaaagagacttagactcccacacattaataatgggagactttaacaccccactgtcaacattagacagatcaacgagacagaaagtcaacaaggatacccaggaattgaactcagctctgcaccaagcagacctaatagacatctacagaactctctaccccaaatcaacagaatatacatttttttcagcaccacaccacacctattccaaaactgaccacatacttggaagtaaagctctcctcagcaaatgtaaaataacagaaattaaaacaaactatctctctgaccacagtgcaatcaaactagaactcaggattaagaaactcactcaaaactgctcaactacatggaaactgaacaacctgctcctgaatgactactgggtacataacgaaattaaggcagaaataaagatgttctttgaaaccaacgagaacaaagacacaacataccagaatctctgggatgcattcaaagcagtgtgtagagggaaatttatagcactaaatgcccacaagagaaagcaggaaagatccaaaattgacaccctaacatcacaattaaaagacctagaaaagcaagagaaaacacattcaaaagctagcagaaggcaagaaataactaaaatcagagcagaactgaaggaaatagagacacaaaaaacccttgaaaaaattaacgaatccaggagctggttttttgaaaggatcaacaaaattgatagactgctagcaagactaatcaagaaaaaaagagagaagaatcaaatagacacaataaaaaatgataaaggggatatcaccaccgatcccacagaaatacaaactaccatcagagaatactacaaacacctctacgcaaataaactagaaaatctagaagaaatggataaattcctcgacacatacaccctcccaagactaagccaggaagaagttgaatctctgaatagaccaataacaggagctgaaattgtggcaataatcaatagcttaccaaccaaaaagagtccaggaccagatggattcacagccgaattctaccagaggtacaaggaggaactggtaccattccttctgaaactattccaatcaatagaaaaagagggaatcctccctaactcattttatgaggccagcatcatcctgataccaaagccgggcagagacacaaccaaaaaagagaattttagaccaatatccttgatgaacattgatgcaaaaatcctcaataaaatactggcaaaccgaatccagcagcacatcaaaaagcttatccaccatgatcaagtgggcttcatccctgggatgcaaggctggttcaatatacacaaatcaataaatgtaatccagcatataaacagaaccaaagacaaaaaccacatgattatctcaatagatgcagaaaaggcctttgacaaaattcaacaacccttcatgctaaaaactctcaataaattaggtattgatgggacgtatctcaaaataataagagctatctatgacaaacccacagccaatatcatactgaatgggcaaaaactggaagcattccctttgaaaactggcacaagacagggatgacctctctcaccactcctactcaacatagtgttggaagttctggccagggcaatcaggcaggagaaggaaataaagggtattcaattaggaaaagaggaagtccaattgtccctgtttgcagatgacatgattgtatatctagaaagccccattgtctcagcccaaaatctccttaagctgataagcaacttcagcaaagtctcaggatacaaaatcaatgtacaaaaatcacaagcattcttatacatcaataacagacaaacagagagccaaatcatgagtgaactcccattcacaattgcttcaaagagaataaaatacctaggaatccaacttacaagggatgtgacggacctcttcaaggagaactacaaaccactgctcaatgaaataaaagaggatacaaacaaatggaagaacattccatgctcatgggtaggaagaatcaatatcgtgaaaatggccatagtgcccaaggtaatttacagattcaatgccatcctcatcaagctaccaatgactttcttcacagaactggaaaaaactacttcaaagttcatacagaaccaaaaaagagcccgcattgccaagtcaatcctaagccaaaagaacaaagctggaggcatcacactacctgacttcaaactatactacaaggctacagtaaccaaaacagcatgggactggtaccaaaacagagatatagatcaatggaacagaacagaacagagccctcagaaataacaccgcgtatctacaactatctaatctttgacaaacctgagaaaaacaagcaatggggaaaggattccctatttaataaatggtgctgggaaaactggctagccatatgtagaaagctgaaactggatcccttccttacaccttatacaaaaatcaattcaagatggactaaagacttaaacgttagacctaaaaccataaaaaccctaggcattaccattcaggacataggcatgggcaaggacttcatgtctaaaacaccaaaagcaatggcaacaaaagccaaaattgacaaatgggatctaattaaactaaagagcttctgcacagcaaaagaaactaccatcagagtgaacaggcaacctacagaatgggagaaaattttcgcaacctactcatctgacaaagggttaatatccagaatctacaatgaactcaaacaaatttacaggaaaaaaacaaataaccccatcaaaaagtgggccaaggacatgaacagacacttctcaaaagaagacatttatgcagccaaaacacacatgaaaaaatgctcaccatcactggccatcagagaaatacaaagcaaaaccacagtgagataccatctcacaccagctagaatggcaatcattaaaaagtcaggaaacaacaggtgctggagaggatgtggagaaataggaacacttttacactgttggtgggactgtaaactagttcaaccattgtggaagtcagtgtggcaattcctcagggatctggaactagaaataccatttgacccagccatccaatcactgggtatatacccaaaggactataaatcatgctactataaagacacatgcacacgtatgtttattgcggcattattcacaatagcaaagacttggaaccaacccaaatgtccaacaatgatagactggattaagaaaatgtggcacatatacaccatggaatactatgcagccataaaaaatgatgagttcatgtcctttgtagggacatggatgaaattggaaatcatcattctcagtaaactatcgcaagaacaaaaaaccaaacaccgcatattctcactcataggtgggaattgaacaatgagaacacatggacacaggaaggggaacatcacactctggggactgttgtggggtggggggaggggggagggatagcactgggagatatacctaatgctagatgacgagttagtgggtgcagggcaccagcatggcacatgtatacatatgtaactaacctgcacattgtgcacatgtaccctaaaacttaaagtataataaataaattaattaattaattaattaaaaaagaagatattttgtcttacacaacttagacatgaactacttgataaacactttcatgggattctcttgaatcttagattcctattgcataatactataaattcagctcccaagtactcaagttaacccatcagtactgtagtatgtatacacacagccataagacagatcctaatttctaattttttttttttttttttttgagacggagtctcgctctgtggcccaggctggagtgcagtggcgcaatctcggctcactgcaagctccgcctcccgggttcacgccattctcctgcctcagcctcccgagtagctgggactacaggcgcccaccatcacgcccggctaatttttttgtatttttagtagagacggggtttcaccgtgttagccaggatggtctcgatctcctgacctcgtgatccgcccgcctcggcctcccaaagtgctgggattacaggcgtgagccaccgcacccgtcctgaaattcttaaaaagtctcaaacaaccgcagagcaacagttttgctttcaaaaatctcaggaactaggtagaaatctttaaaattttaagccgttttcaaaaatcagccaaagaaaacagtaacactgggctctgacagctttactagatgtagaaaccaatttgtgccatttaatgtcggactaccaaatgacatcactcttcccacatggagatcactagtggcactaatggttccacctttttcctgtgagcccagagcagaggcaaagagcagagcactaagcaccataaatccatggagagatactgatcaccaacggcagaaccccacatcagacacacaggccgtgccactcgcttgtcccccaatgcagacttaccaggaggccattccgtaggtcacagtttactcaccctgtttggtaggaattttaatcgtgtttatttaaatctgagagtctctttgtctctctagacgcccacctatgacacaggtgaaaaatcaatcccactcaaaagtagttgggctgtatcctttctgctacctcatttgtttacatttttcaagaaaaatctcaactactatcatcttaaatctttaaaggaaaaattcagttaattgtttcctttttttctttttttgagacagagtcttgctctgtctcccaggctggagtgtagtggcacaatcttggctcactgcaacctccacctcctgggttcaagcgattcttctgcttcagcctcctgagtagctgggattacaggcgtgtgccaccatgcccagctaacttttgtctttttagtaaaattgggtttcaccatactggtcaggctggtctccaactcctgacctcaggtgatccactgcgcctggcccttaactactttttttaaacaactttaagcctttggtttcctctgaagaaaatatttttaacaaaaacactccagaaataacaaaagggctggttctttgaatataaggaataacttttgcctattttccaataaaattgaaatgggaaaggataactggacaagagaaaaattaaagtacaacaatgtgctaacaaatctgaaaatagcaagaatttgtctaggaattaccaaggttaatcacaaaaacttatacatgaccaagtaatttagacctctacaatcaactacctacctaacctaaagtaagtgctatacccaaacagcttcagtacttcgttctttcaagccaaatgctcaagaagaatgacagaagcccagtgaaaagacagacatggaaaaccagaaaggtcaggcagacatattctatgagtaaaaaaaatgtagtaaaaatttaaaacaagagccgggcgcggtggctcatgcctgtaatcccagcactttggcaggctgaggcaggaggatcacgaggtccggagatcgagaccatcctggctaacaccgtgaaaccccgtctctgctaaaaaagaaatacaaaaattagctgggtgtggtggcgggcacctgtagtcccagctactcgggaggctgaggcaggagaatggcatgaacccggaaggtggagcttgcagtgagcagagatcacgccattgcactccagcctgggcgacagagcaagactccgtctcaaaaaaaaaaaaaattaaaacaaggaatggatacaataaataacatcctaatttgcttttttaccttaacttggatatcttttttcactcaaacgtccctactgcattttgacaagagtattccctcaaatagatataccacagttgatttacctcacctacagtgtgtgtgcatagtttccaacttcaatgtttcaataaaatctttgtacataaaatttgtgccctgtttgaatacctctactgcaacacgttcttagaagtagaactgctgagtcaaaagggcctgaacatttaaaattggtaaatattaaattcccatacaaaaaggcccctgctcagtctatggaattctagttattccattccagtaggactccagttaatacatttatgatacctttgaatactgcctttgttttcacataagagtagtggagatgggtaaaaagcatgctgagataaaaattcaggttgaggcaaaaataactttgacaagggtgagtgtatgcagcagccatgtggcaagatcagtttgggtctcctctgtgtgaggtgctgtgcatgacctcatttgtaccccacaacagatccaatttctagaaactaacaacattctcattttagaattgaaaaaactgagccagagaggttaagttatttgcctgaagtcacacaccacctggtggagccacgattcaaacctgggtttctctatctcctaagccagattcataaaccagtatgaagctctcaatgggtatagatatgctttaaaatacagccagagctgccaggcacggtggctcacgcctgtaatcccagcactttgggaaggccgaggtgggcagatcacaaggtcaggagttcgacaccagcctggccaacatagtaaaaccccatctccactgaaaatacaaaaaataagccaggcatggtggcaggcacctgtaatcccagctactcgagaggctgaggcaggagaatggcttgaacctgggaggcggaggctacagtgagcagagatcacaccattgcactccagcccgggtgacagtacaagactctgtctcaaaaaaataaaataaaataatgtataatatttatacaatatatatttatataatatttatattatatatatatttctctagagctgtcaaaaatatacatgaaagctttaaagaaaagtgcccactagaactgtcactcgaggggctgccttcccctctcctctcacaagtcccttgattggccttggtatgacttcctgtgagtcaaaagaaatttcttttgcgtagttggcaaaagcttaaacctatgatcatcaaaatgctaaaaagggcatccagagacagtcagttatttttattttgaaaaataggggtggactgaagattaagaactgaaagcaacaactgaaagcaagcaatgttggccgggctggtcttgaactcctgacctcaggtgatccgcccgccttggcctcccagagtgctggaattactcaggtagttctttatagcggtgtgaaaacagactaatatatactagacatacggtctagaatcatacattgctttttcttgttttttctgagacggagtcttgctcttttgcccaggctggagtgcagtggcacaatctcggctcactgcaactgcaacctccgccttccaagttcaagctattctcctgcctcagcctcccgaatagctggaattacaggtgcacaccaccatgcccggctaatttttgtattttttagtagagatggggttttaccatgttggccaggctggtctcaaatgcctgacctcaagtgatccgcccacctcagcctcccaaagtgttgggattacaggcatgagccactgcgcccggctgctttatttttcataaaagtgaaaggcatgatttatactaagatgatttcttcctttctttaataaatttattgaccataaaatacatgtactaccatgatgatttgggaccatgatgatttggaactgtctgtcaattttaaaagtttgtgctctttgacttagaagttctattacataaattcttagaagtatttgtaccaaggcacagaagtttatgtttaaaaatttgattgcatcattacatgaattagtgaaaaatggaaaactgaactttctgaaaatctttataaagcaccttcagatatagctaaataactgtcaggtgaagataaaggaattgaaacttttaagttgcaaagtatcttaaacgtgcataagatgggtgtgtacagatgagacagagtgagactctgtctcaaaaacaaaaacaaaaaacaaacaaaaaaagaactacccaagaatgggtaatttataaagaaaaggagtttagactcacccctgtaatcctaacactttggaaggccaaggtgggtggatcacctgaggtcaggagttcgagaccaacctgggcaacatggtgaaaccccgtctctactgaaaatacaaaaattagctgggcgtggtggcgtgtgcctgtagtcccagctactcgggaggctgaggcaggagaactgcttgaacctgggaggcagaggttgcagtgagctgagattgtgccactgcactccagcctgggtgacagagcgaaactgtctcagaaaaaaaaaaaaaagaaaaaaaaaaggagtttaattgactcagttggctgggcaggcctcaaaaaacttacaatcgtggcggaagacaaatgggtaacaaggtacgtcttacttggcggcaggagggagagagagagagtaagggatggggcaagtgtcacacctttaaacccttagatttcatgagaactcactatcacaagaacagcaagggggaaatccgcccccatgatccaatcacctcccactgacaagtgggaattacaattcaagatgagatttgggtggggacacagccaaaccatatcaactagtttcctacaaatgaaaatcacttaaactctattgtctcttcctttatatcttcaatccccatcatgtacctcttatttatgtaagagttaacccaaaattcaattcatcatctctaatcacccacccatctctaatcatttgtttcttcagcacctgtataaacagatgtactaaatttgtaccatattgtttacaacttggcaaagttctctggcatactccatgttttctaggataatgtaacacactgcaagtattaatatagctgttagctaaatgaaatctcccttctggctattcagcatttttagaacacatacatcagaagaagacttgccttcctactaaactattatgtggagatttgtgttaggggcctgtcctgcacagcttggccagatcacttctgtttctcttcaccaacaaagaacacaaaataaaattatttcattcttcactatttaagtcagaagaacagcatctctctttggaagatactatataactcacagcccccagtgtgtcacacaattaccatgtgtcatttatccctttatggccttttttattttataactggatagaccaagtgaattaatgccaacactgactatcaactgtgctcaatgttagcattacttcatcattctggtccttgtatcaagaccattaagttaatcttgaccattttaaaaaaaattaagggtgggatctaaatattttatctcactaagaatgtccgtattatgttcttctgaacaatatacttgggggaagctggtggtgataaagaccttttcaatggtcaaactaaacctaatgtgtaactttcccagatttaccccacagtattttgtcatgactgtgtaattatttgtttcctgggctttgttccaaaaagaattttatgctgcttataaaatacacataatctgtaaagataaaacaaaggaggtgaagaaataagagcatagggaactgaacactcaagataagatgaagccaaaaatgctgttatacaaatctggctttaagctt

SEQ ID NO: 94 - DNA, 5504 bp, Homo sapiens
  Genbank Accession No. U07802
aagctttttgtggcaacctgtatgaacgcggagggagaagtgccctagaccagcctccagatcgttcctactggggctgtcagcggctttagctcactgggcgctagatgggagtgtcccctccgtacccggacgaaggcggggcgcccgctggcaaagcgcattttccagcgcaagctgtttggggtgcggggctggcgagtgagggaaaacagagggtggcgcgcccaccatcagcgtctgtgcagccccacctgcgccgcgggttggtctcagccggatcctgcagccctcatcgagcaaaggctgggcgcggcgcccccactgccggggagggaagaggctgggaggacgcaacaggcccaggctgtgccgggcggggagcctgggcaggcagctgcacccccagccccagagggctggggaaggccggcccgaccagcagcaggaaagggggcgctaagtcgccttcaagcccgcacggctctcccggcctttcctcctgtcctcagagtcagctcccccgcccgggacgtcccgcgccactccgcgcctttggccctggctcaaggtcttgtgatgtgattagacaaagccgacgccttgtcctcagacactcagccctgcccggcaggccccggacgctcaagccctgtttactgagcctgggcggggagggggcggaagaaacgagcccgggctccaccggcaagactgccgcggcggccgcccgcgtggccacccccacccccaccgcgactccacgtgcagtcgggctggagccgccaccgactggacgcaggccccgagcccccgcctcctggccggggcaccctttgcaaacccgccgggccgcggggctggttgcgaatatctggcattttgcaattcccgcgcccagtacaaaaccgaagtggagcttaaagctccacaggtccgccgtcggagaacagggcagggaaagacacgtccagggctgcagaatcccggccacgctaaacgaccgggctctccgaccgcgcaccccggaggagaacagccgtgccttcccgccgccacccggcgcatccactggggccgagactacacgccacaccggccgcccgaccgcgggccccgcccggaggcctggagcaccctcccccggaggtaaaaaaattgcgcggccaatgggaggccgggaaggcgcctgacgtccgcgagcgggcgggcggcgttgcctggagaccccggcgggggccgagttctgtcccctcccccggcgcgcccgccccgccgcagccgcactcccgggctctatttagggcgcgcgctcggcggaggccgccgagttccagcagtccgcgagctgccgtcggctccgcggggggggcgggccgggcaccccggggcgcggaggagcgctcctcgcttctctccttcccccctgccgcactccgccggaccctcccgccggcccgcgccgctgcactcgccctctcctctcgccccccggcaaactttcggcccctccccgcccctcgcccgttattcgtcgtggctcaagcccggccacgccgccccaagggctcctcccgacctcccggcctgccgctccggccactgcgggatccagaaacatgtcgaccacacttctgtccgccttctacgatgtcgacttcttgtgcaaggtaggccagggacggggcccggccggcagcagccgttgtagttcttggactttgcctctgtccccaggttctgggggacgcccctcccgccctgcctttcaaagcgggaaagtcccggggtttgcaaaagagtgtccgacccctgagcgggaggacgccgtgtcgcggttgagtttctccactgccgaccgcggccacgctgcccggggcttcccggacagcttcgcgccgcccacctcggcagccggggcggaggatcacgtgtcgaaacccagcgcggcccacggtgggcgtcctcccctctcccgctccgtccagcaagatcttgctggttttgcgcgtgtataggtggagggtggaggcgagtcgggatccgccaagagtgggggaaaaaaaggaaaagaatcagctgggagttcctctgcggctcgccccgagtctgtcttccccttccgtttttcatcccttccccgctcccctccctttggcagacagagaaatccctggccaacctcaacctgaacaacatgctggacaagaaggcggtggggacgcctgtggccgccgcccccagctcgggcttcgcgccgggattcctccgacggcactcggccagcaacctgcatgcactcgcccaccccgcgcccagccccggcagctgctcgcccaagttcccgggcgccgctaacggcagcagctgcggcagcgcggcggccggcggtccggacctctacggcacccttaaggagccgtcggggggcggcggcacagccctgctcaacaaggagaacaaattccgggaccgctcgtttagcgagaacggcgatcgcagccagcacctcctgcacctgcagcagcagcagaaggggggcggcggctcccagatcaactccacgcgctacaagaccgagctgtgccggcccttcgaggagagcggcacgtgcaagtacggcgaaaagtgccagttcgcgcatggcttccacgagctgcgcagcctgactcgccatccgaagtacaagaccgagctgtgccgcacctttcataccatcggcttctgcccctatgggccgcgctgccacttcatccacaacgcggacgagcggcggcccgcgccgtcggggggcgcctccggggaccttcgtgcctttggcacgcgcgatgcgttgcacctgggcttcccgcgggagccgcggcccaagttgcaccacagcctcagcttctcgggcttcccgtcgggccaccatcagcccccgggcggcctcgagtcgccgctgctgctcgacagccccacgtcgcgcacgccgccgccgccctcctgctcttcggcctcgtcctgctcctcctccgcctcctcctgttcctcggcctccgcggcctccacgccctcgggcgccccgacatgctgcgcctccgcggccgctgcggccgctctgctgtacggcaccgggggcgccgaggacctgctggcgccgggggccccgtgcgcggcctgctcgtcggcctcgtgcgccaacaacgccttcgccttcggtccggagctcagcagcctcatcacgccgctcgccatccagacccacaactttgccgccgtggccgccgccgcctactaccgcagtcagcagcagcagcagcagcagggcctggcgccccccgcgcagccgccggcgccgcccagcgcgaccctccccgccggggccgccgcacctccctcgccgcccttcagcttccagctgccgcgccgcctgtccgactcgcccgtgttcgacgcgccccccagccccccggactcgctgtcggaccgcgacagctacctaagcggctccctgagctccggcagcctcagcggctctgagtctcccagcctcgaccctggccgccgcctgccaatcttcagccgcctctccatctccgacgactgaggcaagagggcgccagtgaggaggaagggaaggcggttcagagatgttggaggacacccctcgccatctcgcccttgctgggggcacgggagtggggggggtgacatgggccctaggcagtctgcaagccctaccgagcacttggactcgaactctgtgccgggaggggcccccacccctcctttttcggtttcctcttgtctttttttttttatttttattacgaagtttcattctttttgagcaaaaaagtcgaactttttctgttgaataaaatattcacaacagggcagttgtgatacgaatagaacaaaaaaaaaaaaaaaaacacttaaactttgttaggactccgatgagtttgggacttcaggaaaaatcaacccagcaccagcagctaccaaccaccattccatctcttcacttgaacagcattagttaagtccagatgtgggaacccttctcttggaagaagttcctaattgtgtctcagaccggtgtaaacaaaccagccagccgccaccttgctaaacctataagctttttaaaatccaatatattctgccaagaatatgccttgatagttagccctcagcccataggtgttttttgttttttaacagaattatatatgtctgggggtgaaaaaacccttgcattccaaagctccatactggttacttggtttcattgccaccacttagtggatgttcagtttagaaccattttgtctgctccctctggaagccttgcgcagagcttactttgtaattgttggagaataactgctgaatttttagctgttttgagtgattcgcaccactgcaccacaactcaatatgaaaactatttaacttatttattatcttgtgaaaaatatacaatgaaaattttgttcatactgtatttatcaagtatgatgaaaagcaatagatatatattcttttattatgttaaattatgattgccattattaatcggcaaaatgtggagtgtatgttcttttcacagtaatatatgccttttgtaacttcacttggttattttattgtaaatgagtacaaaattcttaatttaagagattgtatgtaatatttatttcattaatttctttccttgtttacgtaaattttgaaagattgcatgatttcttgacagaaatcgatcttgatgctgtggaagtagtttgaggaacatcctatgagttttcttagaatgtataaaggttgtagcccatccaacttcaatgaaaaaaatgaccacatactttgcaatcaggctgaaatgtggcatgcttttctaattccaactttataaactagcaaaaaagtgtttgcttattccaccagttctactgtgacatactcgagtataaagacatgtagccataacggggagtggggggggagtctccatgcctttgaagggcccgactgccttaaatcttcctcaaccaaatacgtattttattagtgattgagagaatctgaatgtaggatgggttcaactgcacaaaaggaaaagatttttaccactttttttatatagatataaagtgaagcaacccgccttagtgctgaaatatgtagtacatgaatatgccttgtttaattacagaaaattccaaaacttgtactatttttttttccatgtagaaaggcaggaatgtctcctaagctttcctggcagcagatgaatcagcggtagctttagtttgtcgtaggtacagttggagcactatatgtactctctggactactttggacagaagtaggtttttgaatgtaacaagataagtcaacttgagttgtaatatattttgggaaatcagctcactacaaattgtagactgtaaacattgtactgtaaatgttttgtagttttcccccaataaaatttttgggaaaaaagggaattc

SEQ ID NO: 95 - DNA, 1875 bp, Homo sapiens
  Genbank Accession No. X14958
ggccggtgctgcgctcctctaattgggactccgagccggggctatttctggcgctggccgggctccaagaaggcatccgcatttgctaccagcggcggccgcggcggagccaggccggtcctcagcgcccagcaccgccgctcccggcaacccggagcgcgcaccgcagccggcggccgagctcgcgcatcccagccatcactcttccacctgctccttagagaagggaagatgagtgagtcgagctcgaagtccagccagcccttggcctccaagcaggaaaaggacggcactgagaagcggggccggggcaggccgcgcaagcagcctccgaaggagcccagcgaagtgccaacacctaagagacctcggggccgaccaaagggaagcaaaaacaagggtgctgccaagacccggaaaaccaccacaactccaggaaggaaaccaaggggcagacccaaaaaactggagaaggaggaagaggagggcatctcgcaggagtcctcggaggaggagcagtgacccatgcgtgccgcctgctcctcactggaggagcagcttccttctgggactggacagctttgctccgctcccaccgcccccgccccttccccaggcccaccatcaccaccgcctctggccgccacccccatcttccacctgtgccctcaccaccacactacacagcacaccagccgctgcagggctcccatgggctgagtggggagcagttttcccctggcctcagttcccagctccccccgcccacccacgcatacacacatgccctcctggacaaggctaacatcccacttagccgcaccctgcacctgctgcgtccccactcccttggtggtggggacattgctctctgggcttttggtttgggggcgccctctctgcctccttcactgttccctctggcttcccatagtggggcctgggagggttccccctggccttaaaaggggcccaagcccatctcatcctggcacgccctactccactgccctggcagcagcaggtgtggccaatggaggggggtgctggcccccaggattcccccagccaaactgtctttgtcaccacgtggggctcacttttcatccttccccaacttccctagtccccgtactaggttggacagcccccttcggctacaggaaggcaggaggggtgagtcccctactccctcttcactgtggccacagcccccttgccctccgcctgggatctgagtacatattgtggtgatggagatgcagtcacttattgtccaggtgaggcccaagagccctgtggccgccacctgaggtgggctggggctgctcccctaaccctactttgcttccgccactcagccatttccccctcctcagatggggcaccaataacaaggagctcaccctgcccgctcccaacccccctcctgctcctccctgccccccaaggttctggttccatttttcctctgttcacaaactacctctggacagttgtgttgttttttgttcaatgttccattcttcgacatccgtcattgctgctgctaccagcgccaaatgttcatcctcattgcctcctgttctgcccacgatcccctcccccaagatactctttgtggggaagaggggctggggcatggcaggctgggtgaccgactaccccagtcccagggaaggtgccctgcccctaggatgctgcagcagagtgagcaagggggcccgaatcgaccataaagggtgtaggggccacctcctccccctgttctgttggggaggggtagccatgatttgtcccagcctggggctccctctctggtttcctatttacagttacttgaataaaaaaaatatccttttctggaaaaaaaaa

SEQ ID NO: 96 - DNA, 1907 bp, Homo sapiens
  Genbank Accession No. X14957
ggccggtgctgcgctcctctaattgggactccgagccggggctatttctggcgctggccgggctccaagaaggcatccgcatttgctaccagcggcggccgcggcggagccaggccggtcctcagcgcccagcaccgccgctcccggcaacccggagcgcgcaccgcagccggcggccgagctcgcgcatcccagccatcactcttccacctgctccttagagaagggaagatgagtgagtcgagctcgaagtccagccagcccttggcctccaagcaggaaaaggacggcactgagaagcggggccggggcaggccgcgcaagcagcctccggtgagtcccgggacagcgctggtagggagtcagaaggagcccagcgaagtgccaacacctaagagacctcggggccgaccaaagggaagcaaaaacaagggtgctgccaagacccggaaaaccaccacaactccaggaaggaaaccaaggggcagacccaaaaaactggagaaggaggaagaggagggcatctcgcaggagtcctcggaggaggagcagtgacccatgcgtgccgcctgctcctcactggaggagcagcttccttctgggactggacagctttgctccgctcccaccgcccccgccccttccccaggcccaccatcaccaccgcctctggccgccacccccatcttccacctgtgccctcaccaccacactacacagcacaccagccgctgcagggctcccatgggctgagtggggagcagttttcccctggcctcagttcccagctccccccgcccacccacgcatacacacatgccctcctggacaaggctaacatcccacttagccgcaccctgcacctgctgcgtccccactcccttggtggtggggacattgctctctgggcttttggtttgggggcgccctctctgcctccttcactgttccctctggcttcccatagtggggcctgggagggttccccctggccttaaaaggggcccaagcccatctcatcctggcacgccctactccactgccctggcagcagcaggtgtggccaatggaggggggtgctggcccccaggattcccccagccaaactgtctttgtcaccacgtggggctcacttttcatccttccccaacttccctagtccccgtactaggttggacagcccccttcggctacaggaaggcaggaggggtgagtcccctactccctcttcactgtggccacagcccccttgccctccgcctgggatctgagtacatattgtggtgatggagatgcagtcacttattgtccaggtgaggcccaagagccctgtggccgccacctgaggtgggctggggctgctcccctaaccctactttgcttccgccactcagccatttccccctcctcagatggggcaccaataacaaggagctcaccctgcccgctcccaacccccctcctgctcctccctgccccccaaggttctggttccatttttcctctgttcacaaactacctctggacagttgtgttgttttttgttcaatgttccattcttcgacatccgtcattgctgctgctaccagcgccaaatgttcatcctcattgcctcctgttctgcccacgatcccctcccccaagatactctttgtggggaagaggggctggggcatggcaggctgggtgaccgactaccccagtcccagggaaggtgccctgcccctaggatgctgcagcagagtgagcaagggggcccgaatcgaccataaagggtgtaggggccacctcctccccctgttctgttggggaggggtagccatgatttgtcccagcctggggctccctctctggtttcctatttacagttacttgaataaaaaaaatatccttttctggaaaaaaaa

SEQ ID NO: 97 - DNA, 1840 bp, Homo sapiens
  Genbank Accession No. M23615
gagcacgcggcggcggcggtctctgagcgcctctgctctctctcccggtttcagatccgcatttgctaccagcggcggccgcgcggagccaggccggtcctcagcgcccagcacggctcccggcaacccggagcgcgcaccgcagccggcggccgagctcgcgcatcccagccatcactcttccacctgctccttagagaagggaagatgagtgagtcgagctcgaagtccagccagcccttggcctccaagcaggaaaaggacggcactgagaagcggggccggggcaggccgcgcaagcagcctccgaaggagcccagcgaagtgccaacacctaagagacctcggggccgaccaaagggaagcaaaaacaagggtgctgccaagacccggaaaaccaccacaactccaggaaggaaaccaaggggcagacccaaaaaactggagaaggaggaagaggagggcatctcgcaggagtcctcggaggaggagcagtgacccatgcgtgccgcctgctcctcactggaggagcagcttccttctgggactggacagctttgctccgctcccaccgcccccgccccttccccaggcccaccatcaccaccgcctctggccgccacccccatcttccacctgtgccctcaccaccacactacacagcacaccagccgctgcaggggctcccatgggcctgagtggggagcagttttcccctggcctcagttcacagctccccccgcccacccacgcatacacacatgccctcctggacaaggctaacatcccacttagccgcaccctgcacctgctgcgtccccactcccttggtggtggggacattgctctctgggcttttggtttgggggcgccctctctgctccttcactgttccctctggcttcccatagtggggcctgggagggttcccctggccttaaaaggggcccaagccatctcatcctggcacgccctactccactgccctggcacagcaggtgtggccaatggaggggggtgctggcccccaggattcccccagccaaactgtctttgtcaccacgtggggctcacttttcatccttccccaacttccctagtccccgtactaggttggacagcccccttcggctacaggaaggcaggaggggtgagtcccctactccctcttcactgtggccacagcccccttgccctccgcctgggatctgagtacatattgtggtgatggagatgcagtcacttattgtccaggtgaggcccaagagccctgtggccgcacctgaggtgggctggggctgctcccctaaccctactttcgttccgccactcagccatttccccctcctcagatggggcaccaataacaaggagctcaccctgcccgctcccaacccccctcctgctcctccctgccccccaaggttctgggttccatttttcctctgttcacaaactacctctggacagttgtgttgttttttgttcaatgttccattcttcgacatccgtcattgctgctgctaccagcgccaaatgttcatcctcattgcctcctgttctgcccacgatcccctcccccaagatactctttgtgggaagaggggctggggcatggcaggctgggtgaccgactaccccagtcccagggaaggtggccctgcccctaggatgctgcagcagagtgagcaagggggcccgaatcgaccataaagggtgtaggggccacctcctccccctgttctgttggggaggggtagccatgatttgtcccagcctggggctccctctctggtttcctatttgcagttacttgaataaaaaaaatatccttttctgg

SEQ ID NO: 98 - DNA, 1768 bp, Homo sapiens
  Genbank Accession No. M23617
gctttttaagctcccctgagccggtgctgcgctcctctaattgggactccgagccggggctatttctgggctggcgcggctccaagaagggcatcccagccatcactcttccacctgctccttagagaagggaagatgagtgagtcgagctcgaagtccagccagcccttggcctccaagcaggaaaaggacggcactgagaagcggggccggggcaggccgcgcaagcagcctccgaaggagcccagcgaagtgccaacacctaagagacctcggggccgaccaaagggaagcaaaaacaagggtgctgccaagacccggaaaaccaccacaactccaggaaggaaaccaaggggcagacccaaaaaactggagaaggaggaagaggagggcatctcgcaggagtcctcggaggaggagcagtgacccatgcgtgccgcctgctcctcactggaggagcagcttccttctgggactggacagctttgctccgctcccaccgcccccgccccttccccaggcccaccatcaccaccgcctctggccgccacccccatcttccacctgtgccctcaccaccacactacacagcacaccagccgctgcaggggctcccatgggcctgagtggggagcagttttcccctggcctcagttcacagctccccccgcccacccacgcatacacacatgccctcctggacaaggctaacatcccacttagccgcaccctgcacctgctgcgtccccactcccttggtggtggggacattgctctctgggcttttggtttgggggcgccctctctgctccttcactgttccctctggcttcccatagtggggcctgggagggttcccctggccttaaaaggggcccaagccatctcatcctggcacgccctactccactgccctggcacagcaggtgtggccaatggaggggggtgctggcccccaggattcccccagccaaactgtctttgtcaccacgtggggctcacttttcatccttccccaacttccctagtccccgtactaggttggacagcccccttcggctacaggaaggcaggaggggtgagtcccctactccctcttcactgtggccacagcccccttgccctccgcctgggatctgagtacatattgtggtgatggagatgcagtcacttattgtccaggtgaggcccaagagccctgtggccgcacctgaggtgggctggggctgctcccctaaccctactttcgttccgccactcagccatttccccctcctcagatggggcaccaataacaaggagctcaccctgcccgctcccaacccccctcctgctcctccctgccccccaaggttctgggttccatttttcctctgttcacaaactacctctggacagttgtgttgttttttgttcaatgttccattcttcgacatccgtcattgctgctgctaccagcgccaaatgttcatcctcattgcctcctgttctgcccacgatcccctcccccaagatactctttgtgggaagaggggctggggcatggcaggctgggtgaccgactaccccagtcccagggaaggtggccctgcccctaggatgctgcagcagagtgagcaagggggcccgaatcgaccataaagggtgtaggggccacctcctccccctgttctgttggggaggggtagccatgatttgtcccagcctggggctccctctctggtttcctatttgcagttacttgaataaaaaaaatatccttttctgg

SEQ ID NO: 99 - DNA, 1675 bp, Homo sapiens
  Genbank Accession No. M23618
gcatcccagccatcactcttccacctgctccttagagaagggaagatgagtgagtcgagctcgaagtccagccagcccttggcctccaagcaggaaaaggacggcactgagaagcggggccggggcaggccgcgcaagcagcctccggagcccagcgaagtgccaacacctaagagacctcggggccgaccaaagggaagcaaaaacaagggtgctgccaagacccggaaaaccaccacaactccaggaaggaaaccaaggggcagacccaaaaaactggagaaggaggaagaggagggcatctcgcaggagtcctcggaggaggagcagtgacccatgcgtgccgcctgctcctcactggaggagcagcttccttctgggactggacagctttgctccgctcccaccgcccccgccccttccccaggcccaccatcaccaccgcctctggccgccacccccatcttccacctgtgccctcaccaccacactacacagcacaccagccgctgcaggggctcccatgggcctgagtggggagcagttttcccctggcctcagttcacagctccccccgcccacccacgcatacacacatgccctcctggacaaggctaacatcccacttagccgcaccctgcacctgctgcgtccccactcccttggtggtggggacattgctctctgggcttttggtttgggggcgccctctctgctccttcactgttccctctggcttcccatagtggggcctgggagggttcccctggccttaaaaggggcccaagccatctcatcctggcacgccctactccactgccctggcacagcaggtgtggccaatggaggggggtgctggcccccaggattcccccagccaaactgtctttgtcaccacgtggggctcacttttcatccttccccaacttccctagtccccgtactaggttggacagcccccttcggctacaggaaggcaggaggggtgagtcccctactccctcttcactgtggccacagcccccttgccctccgcctgggatctgagtacatattgtggtgatggagatgcagtcacttattgtccaggtgaggcccaagagccctgtggccgcacctgaggtgggctggggctgctcccctaaccctactttcgttccgccactcagccatttccccctcctcagatggggcaccaataacaaggagctcaccctgcccgctcccaacccccctcctgctcctccctgccccccaaggttctgggttccatttttcctctgttcacaaactacctctggacagttgtgttgttttttgttcaatgttccattcttcgacatccgtcattgctgctgctaccagcgccaaatgttcatcctcattgcctcctgttctgcccacgatcccctcccccaagatactctttgtgggaagaggggctggggcatggcaggctgggtgaccgactaccccagtcccagggaaggtggccctgcccctaggatgctgcagcagagtgagcaagggggcccgaatcgaccataaagggtgtaggggccacctcctccccctgttctgttggggaggggtagccatgatttgtcccagcctggggctccctctctggtttcctatttgcagttacttgaataaaaaaaatatccttttctgg

SEQ ID NO: 100 - DNA, 3829 bp, Homo sapiens
  Genbank Accession No. M64347
aaggatggcacagggctggtgccctcggagcgtgtcctggtggggccccagcggctgcaggtgctgaatgcctcccacgaggactccggggcctacagctgccggcagcggctcacgcagcgcgtactgtgccacttcagtgtgcgggtgacagacgctccatcctcgggagatgacgaagacggggaggacgaggctgaggacacaggtgtggacacaggggccccttactggacacggcccgagcggatggacaagaagctgctggccgtgccggccgccaacaccgtccgcttccgctgcccagccgctggcaaccccactccctccatctcctggctgaagaacggcagggagttccgcggcgagcaccgcattggaggcatcaagctgcggcatcagcagtggagcctggtcatggaaagcgtggtgccctcggaccgcggcaactacacctgcgtcgtggagaacaagtttggcagcatccggcagacgtacacgctggacgtgctggagcgctccccgcaccggcccatcctgcaggcggggctgccggccaaccagacggcggtgctgggcagcgacgtggagttccactgcaaggtgtacagtgacgcacagccccacatccagtggctcaagcacgtggaggtgaatggcagcaaggtgggcccggacggcacaccctacgttaccgtgctcaagacggcgggcgctaacaccaccgacaaggagctagaggttctctccttgcacaacgtcacctttgaggacgccggggagtacacctgcctggcgggcaattctattgggttttctcatcactctgcgtggctggtggtgctgccagccgaggaggagctggtggaggctgacgaggcgggcagtgtgtatgcaggcatcctcagctacggggtgggcttcttcctgttcatcctggtggtggcggctgtgaccgtctgccgcctgcgcagcccccccaagaaaggcctgggctcccccaccgtgcacaagatctcccgcttcccgctcaagcgacaggtgtccctggagtccaacgcgtccatgagctccaacacaccactggtgcgcatcgcaaggctgtcctcaggggagggccccacgctggccaatgtctccgagctcgagctgcctgccgaccccaaatgggagctgtctcgggcccggctgaccctgggcaagccccttggggagggctgcttcggccaggtggtcatggcggaggccatcggcattgacaaggaccgggccgccaagcctgtcaccgtagccgtgaagatgctgaaagacgatgccactgacaaggacctgtcggacctggtgtctgagatggagatgatgaagatgatcgggaaacacaaaaacatcatcaacctgctgggcgcctgcacgcagggcgggcccctgtacgtgctggtggagtacgcggccaagggtaacctgcgggagtttctgcgggcgcggcggcccccgggcctggactactccttcgacacctgcaagccgcccgaggagcagctcaccttcaaggacctggtgtcctgtgcctaccaggtggcccggggcatggagtacttggcctcccagaagtgcatccacagggacctggctgcccgcaatgtgctggtgaccgaggacaacgtgatgaagatcgcagacttcgggctggcccgggacgtgcacaacctcgactactacaagaagacaaccaacggccggctccccgtgaagtggatggcgcctgaggccttgtttgaccgagtctacactcaccagagtgacgtctggtcctttggggtcctgctctgggagatcttcacgctggggggctccccgtaccccggcatccctgtggaggagctcttcaagctgctgaaggagggccaccgcatggacaagcccgccaactgcacacacgacctgtacatgatcatgcgggagtgctggcatgccgcgccctcccagaggcccaccttcaagcagctggtggaggacctggaccgtgtccttaccgtgacgtccaccgacgagtacctggacctgtcggcgcctttcgagcagtactccccgggtggccaggacacccccagctccagctcctcaggggacgactccgtgtttgcccacgacctgctgcccccggccccacccagcagtgggggctcgcggacgtgaagggccactggtccccaacaatgtgaggggtccctagcagcccaccctgctgctggtgcacagccactccccggcatgagactcagtgcagatggagagacagctacacagagctttggtctgtgtgtgtgtgtgtgcgtgtgtgtgtgtgtgtgcacatccgcgtgtgcctgtgtgcgtgcgcatcttgcctccaggtgcagaggtaccctgggtgtccccgctgctgtgcaacggtctcctgactggtgctgcagcaccgaggggcctttgttctggggggacccagtgcagaatgtaagtgggcccacccggtgggaccccgtggggcagggagctgggcccgacatggctcggcctctgcctttgcaccacgggacatcacagggtgcgctcggcccctcccacacccaaagctgagcctgcagggaagccccacatgtccagcaccttgtgcctggggtgttagtggcaccgcctccccacctccaggctttcccacttcccaccctgcccctcagagactgaaattacgggtacctgaagatgggagcctttaccttttatgcaaaaggtttattccggaaactagtgtacatttctataaatagatgctgtgtatatggtatatatacatatatatatataacatatatggaagaggaaaaggctggtacaacggaggcctgcgaccctgggggcacaggaggcaggcatggccctgggcggggcgtgggggggcgtggagggaggccccaggggtctcacccatgcaagcagaggaccagggctttttctggcaccgcagttttgttttaaaactggacctgtatatttgtaaagctatttatgggcccctggcactcttgttcccacaccccaacacttccagcatttagctggccacatggcggagagttttaatttttaacttattgacaaccgagaaggtttatcccgccgatagagggacggccaagaatgtacgtccagcctgccccggagctggaggatcccctccaagcctaaaaggttgttaatagttggaggtgattccagtgaagatattttatttgctttgtcctttttcaggagaattagatttctataggatttttctttaggagatttattttttggacttcaaagcaagctggtattttcatacaaattcttctaattgctgtgtgtcccaggcagggagacggtttccagggaggggccggccctgtgtgcaggttccgatgttattagatgttacaagtttatatatatctatatatataatttattgagtttttacaagatgtatttgttgtagacttaacacttcttacgcaatgcttctagagttttatagcctggactgctacctttcaaagcttggagggaagccgtgaattcagttggttcgttctgtactgttactgggccctgagtctgggcagctgtcccttgcttgcctgcagggccatggctcagggtggtctcttcttggggcccagtgcatggtggccagaggtgtcacccaaaccggcaggtgcgattttgttaacccagcgacgaactttccgaaaaataaagacacctggttgctaacctgaaaaaaaaaaaaaaaaaaaaaaaaaaaaaa

SEQ ID NO: 101 - DNA, 1490 bp, Homo sapiens
  Genbank Accession No. M76979
ggacgctggattagaaggcagcaaaaaaagatctgtgctggctggagccccctcagtgtgcaggcttagagggactaggctgggtgtggagctgcagcgtatccacaggccccaggatgcaggccctggtgctactcctctgcattggagccctcctcgggcacagcagctgccagaaccctgccagccccccggaggagggctccccagaccccgacagcacaggggcgctggtggaggaggaggatcctttcttcaaagtccccgtgaacaagctggcagcggctgtctccaacttcggctatgacctgtaccgggtgcgatccagcatgagccccacgaccaacgtgctcctgtctcctctcagtgtggccacggccctctcggccctctcgctgggagcggacgagcgaacagaatccatcattcaccgggctctctactatgacttgatcagcagcccagacatccatggtacctataaggagctccttgacacggtcactgccccccagaagaacctcaagagtgcctcccggatcgtctttgagaagaagctrcgcataaaatccagctttgtggcacctctggaaaagtcatatgggaccaggcccagagtcctgacgggcaaccctcgcttggacctgcaagagatcaacaactgggtgcaggcgcagatgaaagggaagctcgccaggtccacaaaggaaattcccgatgagatcagcattctccttctcggtgtggcgcacttcaaggggcagtgggtaacaaagtttgactccagaaagacttccctcgaggatttctacttggatgaagagaggaccgtgagggtccccatgatgtcggaccctaaggctgttttacgctatggcttggattcagatctcagctgcaagattgcccagctgcccttgaccggaagcatgagtatcatcttcttcctgcccctgaaagtgacccagaatttgaccttgatagaggagagcctcacctccgagttcattcatgacatagaccgagaactgaagaccgtgcaggcggtcctcactgtccccaagctgaagctgagttacgaaggcgaagtcaccaagtccctgcaggagatgaagctgcaatccttgtttgattcaccagactttagcaagatcacaggcaaacccatcaagctgactcaggtggaacaccgggctggctttgagtggaacgaggatggggcgggaaccacccccagcccagggctgcagcctgcccacctcaccttcccgctggactatcaccttaaccagcctttcatcttcgtactgagggacacagacacaggggcccttctcttcattggcaagattctggaccccaggggcccctaatatcccagtttaatattccaataccctagaagaaaacccgagggacagcagattccacaggacacgaaggctgcccctgtaaggtttcaatgcatacaataaaagagctttatccct

SEQ ID NO: 102 - DNA, 1199 bp, Homo sapiens
  Genbank Accession No. M90439
ccaacttcggctatgacctgtaccgggtgcgatccagcatgagccccacgaccaacgtgctcctgtctcctctcagtgtggccacggccctctcggccctctcgctgggagcggagcagcgaacagaatccatcattcaccgggctctctactatgacttgatcagcagcccagacatccatggtacctataaggagctccttgacacggtcactgccccccagaagaacctcaagagtgcctcccggatcgtctttgagaagaagctgcgcataaaatccagctttgtggcacctctggaaaagtcatatgggaccaggcccagagtcctgacgggcaaccctcgcttggacctgcaagagatcaacaactgggtgcaggcgcagatgaaagggaagctcgccaggtccacaaaggaaattcccgatgagatcagcattctccttctcggtgtggcgcacttcaaggggcagtgggtaacaaagtttgactccagaaagacttccctcgaggatttctacttggatgaagagaggaccgtgagggtccccatgatgtcggaccctaaggctgttttacgctatggcttggattcagatctcagctgcaagattgcccaactgcccttgaccggaagcatgagtatcatcttcttcctgcccctgaaagtgacccagaatttgaccttgatagaggagagcctcacctccgagttcattcatgacatagaccgagaactgaagaccgtgcaggcggtcctcactgtccccaagctgaagctgagttacgaaggcgaagtcaccaagtccctgcaggagatgaagctgcaatccttgtttgattcaccagactttagcaagatcacaggcaaacccatcaagctgactcaggtggaacaccgggctggctttgagtggaacgaggatggggcgggaaccacccccagcccagggctgcagcctgcccacctcaccttcccgctggactatcaccttaaccagcctttcatcttcgtactgagggacacagacacaggggcccttctcttcattggcaagattctggaccccaggggcccctaatatcccagtttaatattccaataccctagaagaaaacccgagggacagcagattccacaggacacgaaggctgcccctgtaaggtttcaatgcatacaataaaagagctttatccct

SEQ ID NO: 103 - DNA, 22484 bp, Homo sapiens
  Genbank Accession No. U29953
  unsure (1)..(22484): n = a or c or g or t
gcggccgcagggtggactgtgctgaggaaccctgggcccagcaggggtggcagcccgcgcagtgccacgtttggcctctggccgctcgccaggcatcctccaccccgtggtcccctctgacctcgccagccctcccccgggacacctccacgccagcctggctctgctcctggcttcttcttctctctatgcctcaggcagccggcaacagggcggctcagaacagcgccagcctcctggtttgggagaagaactggcaattagggagtttgtggagcttctaattacacaccagcccctctgccaggagctggtgcccgccagccgggggcaggctgccgggagtacccagctccagctggagacagtcagtgcctgaggatttgggggaagcaggtggggaaaccttggcacagggctgacaccttcctctgtgccagagcccaggagctggggcagcgtgggtgaccatgtgggtgggcacgcttccctgctgggggtgcagggggtccacgtggcagcggccacctggagccctaatgtgcagcggttaagagcaagcccctggaagtcagagaggcctggcatggagtcttgcttcttgcaaacgagccgtgtggagagagagatagtaaatcaacaaagggaaatacatggtctgtccgaggatgagctgccggagagcaatggtgaaagtgaagtgggggagggggcggggctgggaggaaaagccttgtgagaaggtgacacgagagcacggccttgaaggggaagaaggagggcactatggaggtcccggcgaagcgtggcctggccgaggaacggcatgtgcagaggtcctgccgaggagctcaagacaagtaggggacggtggggctggagtggagagagtgagtgggaggaggagtaggagtcagagaggagctcaggacagatcctttaggctctagggacacgataaacacagtgttttttgtcttgtcaagtgtgtcctttttatttttttgaaagagtctcgctctgtagcccaggctggagtgcagcggtgcgacctcggctcactgcaacctctgcctcccgggtccaagcaattctcctgcctcagcctcccgagtagctgggattacaggcacccgccaccacgcactgctaatttttgtattttagtagagaccgggttttgccatgttggtcaggctggtctcgaactcctgacctcaggtgatccgcccgcctcggcctcccagagtggtgtgagccactatgccctgcagcacttgtcaagtctttctcagcgttcccctcctctccactgcagctcccagtgccccagtctgggcctcgtcttcacttcctgggatccctgacattgcctgctaggctctccctgtctctggtctggctgccttcactgtaacctccacccagcaggtacctcttcagcacctcccatgaacccagcagaataccaagccctggggatgcagcaacgaacaggtagacgctgcactccagcctgggcgacagagcaagactccgcctgaagaaaaaaaaaaggaccaggccgggcgcggtggctcacgcctgtaatcccagcactttgggaggccgaggtgggtggatcatgaggtcaggagttcaagaccagcctggccaaaatggtgaaaccccgtctctactgaaaaatacaaaaattagctgggtgcagtggcgggcgcctgtagtctcagctactcaggaggctgaggcaggataattgcttgaccccaggaggcagaggttgcagtgaaccgagatcacgccactgcactccagcctgggcgacagagcaagactctgcctcaaaaaaaagaataaaaataaaaaaaaggaccagatacagaaaacagaaggagacgtactatgaaggaaattggagagcttttgggatactgagtaactcagggtggcctttcccaggggacatttagctgagagatagacggtatgaagacctgaccgttcagaaacaggggaagaggcagcagcccgggcaaaggcctttggggcaggaaagggcttggatcactggagaagcagaaagatggccagtgtgaccagagtgtgacaaagtcagagaaaaccaggaagatggagctggagacacaggcggggccagatcacgagggtcctcgcagaccagagcaagggtttggattttattccaagtatgaagggaagctgctgaagtgtgttttcctttacaatttgtagttgaaatataatatgcaaagtacacaagtcttaactatatgtaagcttaatgaatgtttccatgaaccaaataccgctgtgcaaccatcaccagctcaagagacgaacccttctccctcctcctgactgccagtaacatagtggttcagctcaagaaacagaactcttctgacttcccctaacatagcgggttttcttttttgttttgttttttgttgttttttaagagacaatgtctttattatttttatttttttttatttttgagacggagtcttgctgtcgcccaggctggagtgcagtggtgcgatctcggctcactgcaggctctgccccccggggttcatgccattctcctgcctcagcctccctagcagctgggactacaggtgcccgccacctcgcccggctatttttttgtatttttagtggagacggggtttcaccgtgttagccaggatggtctcgatctcctgacctcgtgatccgcccacctcggcctcccaaagtgctgggattacaggcatgagccaccgcgcccagccaagagacacggtcttgctctgtcgcccaggctggatggagtgccgtggtgcgatcacagctcgcggcagccttgacatcctgggctcaagcaaccttcctgccttggcctcccaaatgttgggattataggcatgagccactgtgcttggcatctattcatctttaatgtcaagcaggcaattgaatatttgatcagggatagaattgtctatttgggggtatgcagatgtgcttcatgtcatggaactgggccgggcgcggtggctcatgcctataatcccagcactttgggaggccgaggcaggcggatcataaggtcaggagatcgagaccatccgggccaacacggtgaaaccccgtctctactaaaaatacaaaaattaggcaggtgtggtggtgcgtgcctgtagtcccagctactcagggaggctgagacaggagaattgattgaacctgggaggcagaggttgtagtgagccaagatcgcgccactgcactccagcctgggcgacatgagcgagactccgtctcaaaaataaacaaaaaaaagtcatggaattgatggaaattgcctaaggggagatgtagaagaaaaggggtctcaggatcaagccagcagagaaggcagaaaaggtaaggtgtgtgaggtggcagaaaaagggaagagtgtggacagtgagggtttcaaggaggaggaactgtctactgcctcctgccaaggacggaggtgtccactgccagttgacataaggtcacccatgaacttggtgacaggaatttcagtggagaagtggccacagacacaagtctagaattgaaatgggagccgaggcagcgtagacaaaagaggaaactgctccttccagagcggctctgagcgagcaccgagaaatgggcagtggctttaggggatgtagcgtcaaggaagtgtcttttaaagaagtcgggggccgggcacggtggctcacgcctgtagtcccagcactttgggaggccgaggcaggcagatcacttgaggtcaggagttcgagaccagcctggctaacacgatgaaaccccgtctctactaaaaatacaaaaaattagctgggcacggtggctcgtgcctgtaatcccagcactttgggaggcagaggtgggcagatcacttgaggtcaggagtttgagaccagcctagccaacatggtgaaaccccatctctactaaaactacaaaaattagccgggagtggtggcacgtgcctgtaatcccagccagtcaggaggctgaggcaggagaatcactggaatcctggaggtggaggtggcagtgagccgagatggtacctctgtactccagcctgggggacagagtgagactccgtctcaaaaaaaaaagaaggtggggaaggatctttgagggccggacacgctgaccctgcaggagaggacacattcttctaacaggggtcggacaaaagagaactcttctgtataatttatgattttaagatttttatttattattattttttatagaggcaagcatttttcaccacgtcacccaggctggtctccaactcctgggctcaagtgtgctgggattatagccatgagtcaccacacctggcccagaaactttactaaggacttatttaaatgatttgcttatttgtgaataggtattttgttcacgtggttcacaactcaaaagcaacaaaaagcacccagtgaaaagccttcctctcattctgatttccagtcactggattctactcttgggatgcagtgtttttcatctcttttttgtatccttttggaaatagtattctgctttaaaaagcaaatacaggccaggtatggtggctcactcctgtaatcccagcactttgggaggccgaggcaggtgatcacctaaggtcaggagttcaagaccagcctggccaatatggtgaaaccctgtctgtaccaaaacacaaaaacaaaaacaaaaacaaaaattagccgggcgtggtggcgtgctcctgtaatcccagctactcaggaggctgaggcaggagaatcgcttgaacctgggaggcagaggttgcagtgagccgagattgtgccactgtactccagcctgggccacagagcaaggttccatctcaaacaaaacaaaacaaaacaaacaaaaaaacaaaacaaaagctaatacaaacacatatacaatagacaaaactgtaaatattttattatttttattttttttagtagagacagggtttcaccatgttggccaggatggtctcaaactcctgacctcaggtgatccacccacctcagcctcccgatagttaggattacaggcatgagccaccacacccggcctaaaattgtaaacgttttagaagaaagtatagatgaatcccttcgtgatctcggggaagaagagattttttaaaaaagataccaaaagaagcacaaattataaaagaaaagattgaaaatgttggtgttaaaattaaaaacttgttttaaaacaagcttgtgtaacccatgacccacaggctgcatgtggcccagaaaagctttgactgcagcccaacacaaattcgtaaactttcctaaaacattatgagattttttttgagattttgttttgttttgttttttgtttttttagctcattcggtatcattaatgttagcatattttacgtggggcccaagacaattcttcttccaatgtgtctcaggggagccaaaagattggacacccctgccataaacatgaaaagacaatggccgggcacggtggctcacgcctgtaatcccagcactttgggaggctgaggggggcgggatcacctgaggtcaggagtttgagacaagcgtgaccaatgtggtgaaaccctgtctctactaaaaatacaaaaattagccgggcatgctcgtgcacacctatagtcccaactactcagcagggtgaggcaggagaacctcttgaacccgggaagcggaggttgcagtgagccgacattgcacccctgcactccagcctgggtgacagagtgagtctccactggaaaaaaaaaaaaaagaacagtgtgatacattgacctaaggtttaagaacatgcaaactgatactatatatcacttagggacaaaaacttacatggtaaaagtaaaaagaaatgtacgaaaataataaaaatcaaattcaagatggtggttatggtgacgggaaagaactgaggcggaaatataaggttgtcactatattgagaaatttttctatctttttttcttttttctttttttgagacggggtctcgctctgtcgcccaggatggagtgcagtggtgtgatctcagctcactgcaacctccgcctcccaggtttaagtgattctcctgcctcagactcccaagtagctgggactacaggtgcgcgccaacacacctgggtaattttgtttgtatttttagtagagatggggtttcaccgtgttgactaggctggtctcgaactcctgacctcaggtgatcccccggcctcggtctcccaaagtgctgggataacaagcgtgagccactgcgcccagctttgtttgcatttttaggtgagatggggtttcaccacgttggccaggctggtcttgaactcctgacctcaggtgatgcacctgcctcagtctcccaaagtgctggattacaggcgttagcccctgcgcccggcccctgaaggaaaatctaaaggaagaggaaggtgtgcaaatgtgtgcgccttaggcgtaatggatggtggtgcagcagtgggttaaagttaacacgagacagtgatgcaatcacagaatccaaattgagtgcaggtcgctttaagaaaggagtagctgtaatctgaagcctgctggacgctggattagaaggcagcaaaaaaagctctgtgctggctggagccccctcagtgtgcaggcttagagggactaggctgggtgtggagctgcagcgtatccacaggtaaagcagctccctggctgctctgatgccagggacggcgggagaggctcccctgggctggggggacaggggagaggcaggggcactccagggagcagaaaagaggggtgcaagggagaggaaatgcggagacagcagcccctgcaatttgggcaaaagggtgagtggatgagagagggcagagggagctggggggacaaggccgaaggccaggacccagtgatccccaaatcccactgcaccgacggaagaggctggaaaggcttttgaatgaagtgagtgggaaacagcggaggggcggtcatggggaggaaaggggagctaagctgctgggtcgggtctgagcagcaccccaagactggagcccgaggcaaggaggctcacgggagctgcttccaccaagggcagtcaggaaggcggccgccctgcagcccagccctggcccctgctccctcggctccctgctactttttcaaaatcagctggtgctgactgttaaggcaatttcccagcaccaccaaaccgctggcctcggcgccctggctgagggctgggatggaggacagctgggtccttctagccagcccccacccactctctttggctacatgagtcaaggctgggcgaccaatgaggttgtggcctccggcaaacaatgaccactatttaggccggcaggtgtatagggcgtgggggcccagctgccagtgctggagacaagggctgtccgagatgaaccctttctgctgcctgccaagccactgggaggggtaggtctcagcaggattcccagaaaccccgcccctgtccagcctaggccccccacccggtgttagctaacccaacgttagcccccaggttccgtggggttggggggcagggagtcctattcttggggctgctgcttctggggtgtggggaagtgcaactccacggcaccctgggctgactcattcagcttctaaagcttcaggaaacattgtttggggctgggtcaccatgggtgggccagagaggacccctcaatcccctccggagagccaggggagggggaggtgcccttccccatgctatctccgaggcccactgccatgtggctgaaggctgtgcggttctgggaagagggggaggtggcggtggaggctgtttgtctcctaactgggcttaatctgaaacacatgtattggcttgagttgatccgcctcacgtggaggcaagatcacaaaagcttctgtgtttcttgatgtgggcaattgtcagaaaataaggcctgaccttggcccagcagggagggtatctacctctccctgagccctcccccgcctgctaggacgagagcggggcttggatactgccctttggacaggatggcatcattgtctgtggctgcagccagccagcggtcgcctgctcagcccatgagcaaccactgtggacagggtattgcgtgtgtgctgaggggcgtccatgcagacccccacgcttgccctctcactgcccttgtagggttttcaatcatctctcctcttcccttatccagatggcttgaagtggaggattcagacttgccgttaatactctgggtccctgtgtctagctcggggccacctttggacccatgtcccttccctgccaggctccctcacctcacctcagcctacccacattgtgacaatcatctaccacctgatctggggtttgggcttagattctgtaggcaccaagactaaagtcgctccttcaagtccatttgaattgtgactttagtttccttaaatactatgccaggataatggccagggatggtggctcacgcctgtactcctggcactttgggatgctggtggatcacctgagatcaggattccaggccagcctggccaacacggtgaaaccccatctctactaaaacataaaaattaaccaggtgtggtggcgggcacctgtaatcccagctactcaggagactgaggcaggagaattgcttgaacccgggaggtggaagttgcactgagctgagatcgcgccactgcactttagcctgggcgacaagagtgaaactctgtctcaaaaacaaaaaaaactatgccgggatgagcctgtctcctcccttaatttcttacttgggccagaggaactagaactaacaacttctcttctagccttgcctcctgtgtacctcactgaatttttggtctctaataaaccagtctgcagaggctcaggggaggcaggctcctggcagctgggtggggctggccccagccgggtggagaccagctgtaggcctggatggtggtgaggcctctgtcttgcactgcagaaagcttttcctgttgtctacacgaaagttttctccctgcatgtcagggcagccacgtgcaagagcagctggctgggaacgcagaggtctgcggctcgaggcggggtttagaaagaaaaccaggctgcttcctgctgcccgtcctgccttaagctgagtaaactcaaaggcaatcttctttcatgcctcacgatattgtccagtggattatctgatttaatttgaaggacgagagccaacaatcacacaacgtcctcccaaattttctgatccactttgttctgggaagtcaaaaagtgcgtgtgctgtgtgggtggatgtttgtgtatataaatggataatgaaggatgatgtgttgggggccagggcaggggagacaacgctgttcagattctacatttttttttccttttttttttttttttgagatggagtcttgctctgttgcccagcctggagtgcagtggcgcgatctcagctcactgcaacctccacttcctggattcaagtgattctcctgccttagcctcccaagtagctgggattacaggcatgcgccaccacacccggctaatttttgtatttttagtagagatggggtttctccatgttggccaggatggtctcaaactcctgacctcaggtgatctacccgcctcggcctctcaaagtgctgggattacaggtttgagccactgcgcctggcctttttttttttttttgagatggagttttcactcttgttgcccaggctggagtgcagtggtgcgatcttggctcactgcaacctccacctcccaagttcaagtgattctccagccttagccctccaagtagctgggactacaggtgtgtgccaccatgcctggctattttattttattttattttatttatttatttttgagactaagtcttgctctgttgcccaggctggagtgcagtggcataatcggctcactgcaacctctgcctcccaggttcaagtgattctcctgcctcagcctcctgagtaactgggattacaggggcctgccaccacgcctggctactttttgtatttttagtatagatggggtttcaccatgttggccaggctggtctcgaactcctgacctcaggctatccgcctgcctcagcctcccaaagtgctgggattacaggcatgagccactgtgctcggtagttgttttattttaatagtaggttattttatttccattttacaagagaaaaaatggtgatttaaagagctactaagacacagcactgagaccatgtgtgatggcatgcgcctgcagtcccagctactcacgaggctgaggcaggaggatcacatgaggtcaggagttccaggctgtggagtgctatggttgtgtagtgaatagccactacactccagcctgggcagcacagcaagatcttgtctcccaaaaaaaaaaaaaaaaaaaaatttcaaatgtgaacccaggatctctgaccctaggccctgcactcctaaccatgggaggaagagctcttgaaagggaactgtgggagaagggaatgagctgccttgtgaggccacagaagtccaaagacagcttgagaatttggagggacagcacgtgccggactgggtgcctctatgcttggtatccggtgattccatggaggagacctgggttctgccccattctcctgggaggggttgcccaaagtcttatcaccggagtgggtcagctgcctccaggacaaagctttagcatacacttgtgctgggccatactccacgtggagaagccctgctggggctggggccccactgctctggatctttaaaagctattggttcaggggccaggtgtaatggctcacacctataaccctagcactttgggaggctgaagcaggtggatagcctgaggtcaggagtttgagacaagcctgatgaacgtggtgaaaccccatcgctattaaaatacaaaaaattagccgggcatggtggcaggtgcctgtaattccagctacttgggaggctgaggcgggagaatcgcttgaacccaggaggcggaggttgcagtgagccaagatcgctccactgtactccagcctgggcgacagagccagactctgtttcaaaaaataaaatataaataaataaataaataaataaataaataaataaaagctttaggcttaaaggagggtcccctgacgcagacagtggaacaaaagcacaagcttatggtatgactgtgggccctgaggcagggggaggggcgggagaaccttgctgggagggatgggccatcaagctgagggtccacttctgggggcctggaggggtgaggggtggtcgctgcagggggtgggggaaagtgactagccctgcccaacccctgggtcctggctggggtggccaggaaggggtagcggggcagtgcagtgtcgggggagagcggcttgctgcctcgttcttttcttgcaggccccaggatgcaggccctggtgctactcctctgcattggagccctcctcgggcacagcagctgccagaaccctgccagccccccggaggaggtcagtaggcaggcggggagggcgtggtcagcattccccgcccctccttggcaggcagcacgggaaacaggacagggaacccggacccaggttccaggccaggcttgggcctttatttctctagggctggagtttctccagcagcaaaacagagagaaaatgtcttgccttgcctttcaggggatggagtagggacatgaataagatcccaaaagagtaaaaatctgaagcacttttaacaagtccagggcaattctcctgcctcagcttcccaagcagctgggattacaggcatgcaccaccaagcccggctcattttgtatttttagtagagacggggtttctccatgttggtcaggctggtctcgaactcccgacctcaagtgattctcctgcctcggcctcccaaagtgccgggatgacaggtgtgagccaccgcacctggccaggatcttttctcattaccttgtcttcctagtgggggctccactgagcaggtcatgttcccggacatttgttcggatactgaccaggctgtggcagggagtgagggtatggagtgacctctctcctgcccagaaagggcgcagctgggttcccaaggcagatacaggcacatggagggaagcctgggccatatgagtgttatggggtgagtgttggcggaggcccacccttgagggacaagagcagctgggcatcttggcgagagccctggactttcgtgaggtcagagtatgaattctgcgtctccctcttcctagctttgtgaccctagacaacccttacctcagtctttgcttccttgcctatgaaatgggataaaaacacccattctacagggccatgtggccactcatttatttctcatctaccaaacacctactcgacaggggctggcaatgggcggaaataaaaactcagttctgccgggtgcggtggctcacacctgtaatcccagcagtgtgggaggcggagcaggacgatcccttgaatccaggagtttgagaccagcataggcaacatagtgagacccctgtctctacacaaaagcaaaaattaccaggcgtggtggcaagtgcttgtggtactacctacttgggaagctgaggtgggaggatcacttgagcccaggagattaagactgcagtgaggggccgggcgcggtggctcacgcctgtaatcccagcactttgggaggtggaggtgggtggatcacgaggtcaggagatcgagaccatcctggctaacacggtgaaaccccgtctctactaaaaatacaaaaaattagctgggtgtggtggggggcgcctgtagtcccagctactcgggaggctgaggcaggagaatggcgtgaacccgggaggtggaggttgcagtgagctgagctcgcaccactgcactccagcctgggcgacagagtgagactccgtctcaaaaaaaaaaaaaaaaaaaagaaagaaagaaaaactgagttcttttttttaactttctttttttagagacagagtctcactccatcacccatgctggagtacagtggtgcgatcttggctcactgcaatcttggcctcctgagttcaaccaattctcatgcctcagcctcccaaatagctgggaccacaggcacgtgccaccacgcccagctaattttttgggtatttttagtagagatggggcctcaccatgttgctcaggttggtctgaaactcctgagctcaagtgatccatcttcctcggcctgccaaagtgctgggattataggcataagccactgcacctagctcccaatttttatatttatatttatttttatttacttatttattttttgagacagggtctcactctgtcacccaggctggagtacagtggcactatctcagctcactgcaacctctgcctcctgggttcaagcgaatctcgtgcctcagcctcctgagtagctgggattacaggcatgcaccaccatgccccgttaatttttttgtatttttagtagagacgggtttcaccgtgttgcccaggatggtctcgaactcctgacctcaagtgattcacccacctcagcctcccaaagtgctgggattataggtgtgagccactcggctgatggtttttaaaaagtgggtcatggggctgggcgcggtggctcatgcctgtaatcccagcactttggtagaccgaggcgggtggatcacaaggtcaggagatcgagaccatcctgcctaacacggtgaaaccccgtctctactaaaaatacaaaaaattacccaggcatggtggtgggcgcctgtagtcccagctactcgggaggctgaggcaggagaatggcgtgaacctgggaggcggagcttgcagtgagccgagatcacgccaccgtactccagcctgagcgacagagcgagactccgtctcaaaaaaaaaaaaaaaaagtgggtcataggtttcggcttataggtcacaagtgtttaaacctggccatgaggccaggcgcagtggcgcatgcctgtaatcccagccatttgggaggctaaggcaggaaaatcgcttgaaccggggaggtggaggttgcagtgagctgagatcgcgccactgaactctagcctgggtgacacagtaagactctgtctcaaataaaaaaaaaaacagctgatctctcttctgcgctgtctctccacagagagctcatgcgtgatcagggagtaaaactcattcccgttttaggccaaacacagaaaaattaggaaggacagccccaaggggccagaaccaccaccctacacaaagccgtgaggagacagtccctgtgcatctctgcgagtccctgaactcaaacccaagacttcctgtctcctgccagggctccccagaccccgacagcacaggggcgctggtggaggaggaggatcctttcttcaaagtccccgtgaacaagctggcagcggctgtctccaacttcggctatgacctgtaccgggtgcgatccagcatgagccccacgaccaacgtgctcctgtctcctctcagtgtggccacggccctctcggccctctcgctgggtgagtgctcagatgcaggaagccccaggcagacctggagaggccccctgtggcctctgcgtaaacgtggctgagtttattgacatttcagttcagcgaggggtgaagtagcaccaggggcctggcctgggggtcccagctgtgtaagcaggagctcaggggctgcacacacacgattccccagctccccgaaaggggctgggcaccactgacatggcgcttggcctcagggttcgcttattgacacagtgacttcaaggcacattcttgcattccttaaccaagctggtgctagcctaggttcctgggatgtaactgcaaacaagcaggtgtgggcttgccctcaccgaggacacagctgggttcacaggggaactaataccagctcactacagaatagtcttttttttttntttttttnnnctttctgagacggagtctcgctttgtcnccaaggctggagtgcagtggtgtgatctcagctcactgcaacctctgcctccctggttcaaggaattctcctgcctcagcctccagagtagctgggattacaggcacctgccatcatgcccagctaatttttgtatttttagtagagacggggtttcaccatgttgcctaggctggtctcaaactcccgggctcaagcgatccacccgccttggcctcccaaagtgctgggattacaggcgtgagccaccgcgcctggccagaataatcttaagggctatgatgggagaagtacagggactggtacctctcactccctcactcccaccttccaggcctgatgcctttaacctacttcaggaaaatctctaaggatgaaaattccttggccacctagattgtcttgaagatcagcctacttgggctctcagcagacaaaaaagatgagtatagtgtctgtgttctgggagggggcttgatttggggccctggtgtgcagttatcaacgtccacatccttgtctctggcaggagcggagcagcgaacagaatccatcattcaccgggctctctactatgacttgatcagcagcccagacatccatggtacctataaggagctccttgacacggtcactgccccccagaagaacctcaagagtgcctcccggatcgtctttgagaagagtgagtcgcctttgcagcccaagttgcctgaggcatgtgggctccatgctgcaggctgggggggtcttttttttttttggggaaagacggagtctcgctctgttgcccaggttggagtgaagtggcgtgatctcggttcactgaaacccccacctcccgggttcacaccatcctcctgcctcagcctcccgagtagctgggactgcaggngcccagctaatctttnttgtatttttagcagagacggggtttcaccgtgtttgccaggatagtctcgatctcctgacctggtgttctgcccgcctcgacctcccaaagtgctgggattacaggtgtgagccaccgcgctcggcccgtttctaaacaatagatcatgtgtgcccaggcctggcctggcactggtgtggaggaagggcccgtgagcccaaagaggctcagaaagaggaagtgggctgcaggagacggtgggaggggcagggagggcagtggcgcgatgtggggaaatctgctgcccccctggccagtgcctggggatgccagcagaagtcctggcaagtcacaggaagatgctggctgggaagtcagggcctgctgagcgctaaaccagaacccgagcctggcaggctctcaaagacgggatgcttgtcgtcgagtctcatacgctaacctctgctccgcctcttctcagagctgcgcataaaatccagctttgtggcacctctggaaaagtcatatgggaccaggcccagagtcctgacgggcaaccctcgcttggacctgcaagagatcaacaactgggtgcaggcgcagatgaaagggaagctcgccaggtccacaaaggaaattcccgatgagatcagcattctccttctcggtgtggcgcacttcaagggtgagcgcgtctccaattctttttcatttattttactgtattttaactaattaattaattcgatggagtcttactctgtagccctaactggagtgcagtggtgcgatctcagctcaatgcaacctccgcctcccaggttcaagcaattcttgtgcctcagcctcccgagtagctgggattacagggatgtaccaccactcccggctaattttttgtatttaatagacatggggtttcaccatgttggccaggctggtctcgaactcctgagctcaggtggtctgcccgcctcagcctcccaaagtgctaggattacaagcttgagccaccacgcccagccctttttatttttaaattaagagacaaggtgttgccatgatgcccaggctggtctcgaactcctgggctcaagtaatcctcccaccttggcctcccaaagtgctgggattacaggcatgagccaccgcgcccggcccttttacatttatttatttattttttgagacagagtcttgctctgtcacccaggctggagtgcagtggcgcgatctcggctcactgcaagctctgccttccaggttcacaccattctcctgcctcgacctcccgagtagctgggactacaggcgcccgccactgcgccctactaattttttgtatttttagtagagacggggtttcaccgtggtctcgatctcctgacctcgtgatccacccgcctcagcctcccaaagtgctgggattacaggcgtgagccactgcgcccggcccttttacatttatttttaaattaagagacagggtgtcactatgatgccgaggctggtctcgaactcctgagctgaagtgatcctcccacctcggcctcccaaaatgctgggattaccatgtccaactttccacttcttgtttgaccaaggatggatggcagacatcagaaggggcttggaaagggaggtgtcaaagaccttgcccagcatggagtctgggtcacagctgggggaggatctgggaactgtgcttgcctgaagcttacctgcttgtcatcaaatccaaggcaaggcgtgaatgtctatagagtgagagacttgtggagacagaagagcagagagggaggaagaatgaacactgggtctgtttggggctttcccagcttttgagtcagacaagatttatttatttatttaagatggagtctcattctgttgcccaggctggagtgcagtggtgccatcttggctcactacagcctccccacctcccaggttcaagtgcttctcctgcctcagcctcccgagtagttgggattacaggcgcccgccaccacacccagctaatttttgtattttcagtagagatggggtttcgccatgctggccaggctgttctcgaaaactcctgacctcagatgatccacccgcctcggcctcccacagtgctgggattacaggcgtgagccactgcgctggccaaatcagacaaggtttaaatcccagctctgcctgtactagctgaggaactctgcacacatttcataacctttctgggcctacgttctcacctttaacgtgaggataatatatctacttcatagacacctttttatgttgtctccaagttttctaacagctctagttctgtacccaagacatggcaggtggccaacgacatccttctaggctgtggtgatgtgtttggagcttgttccacgggtcttgtgtggggccagccctgttcagataaggccttgtggggtggcctggggtagggggaggggttgggcaaactctcccttaaaacgctttgtaaccatctgaggcaccagcaagagcggcccccgagcctggacaaaatccaaacggcttcctacttcaagcactgatgtctagtgagtgaaggaacagctctgggtccaggatattataggtcacattaaactaaaggggcttggccatcagctggcttccagagcgtcagccagttacttcacctctttggctttggcctgttttcagctacaagaggacttaatccagaggacctcagaggtccttcccagctcagaccttctttgactgtctcccagagacactgctgtaggagtgcacaccagtttacttttctttcttttgtttttgagatggagtttcgctctttttgcctaggctggagtgctgtggtgtgatctcagctcactgcaacctctggctcccaggttcaagtgattctcctgtctctgcctcccgagtagctgggattacagacacccaccactgcacccggctagtttttgtattttcagtagagatggggtttcgccatgctggccaggctgttctcgaaaactcctgacctcagatgatccatccgccttggcctcccaaagtgctgagattacagatgtgaggcaccacacccggccatttttgtatttttagtagagacggggttttgccatgttggccacgctggtctcaaactcctgacctcaagtgatctgcccaccttggcctcctgaagggctgggactacaggcgtgagtcaccgtgcccggccatttttgtatttttaggacagcgttttttcatgttggccaggctggtctcaaactcctgacctcaagtgatccacccaccccggcctcccaatatgctgggattccaggtgtgagttaccatgcccggctaccactttacttttcctgcaggctatcacagaacgtgtacaatctagactctaatcaaccaaatcaacgtcttgccatcggagtttgctggtgaagggcacttggggtcctggaaataactgtaggctccaagccacacacactgagataggcctattccctgaggcctcagagcccctgacagctaagctcccttgagtcgggcaattttcaacaacgtgctctggggacacagcatggcgccactgtctttctggtctcctggggctcagactatgtcatacacttctttccagggcagtgggtaacaaagtttgactccagaaagacttccctcgaggatttctacttggatgaagagaggaccgtgagggtccccatgatgtcggaccctaaggctgttttacgctatggcttggattcagatctcagctgcaaggtctgtggggataggggcagggtggggggtggatggagggagaggatagagaagcaaaacagggtagtgggaataaaatgacctttgagatccgacagctgtctacatgtcgcctgctgtgtgactttgagcaggttaataacatgtctgagctttcctcctcttaagatggggcaggggatcgttaccaacacttaccctcccagggtttgttgtaaggacgaataaggtaataggaaatgggccctcagcactgggcacccacatgtttgttctcttgagactcctatttctagaatttaaagccaaactttgaaaaataatgacaaactccaaatcgttggcatctttttttttttttgagacagtctcgctctgtcggccaggctggagtccagtggcacgatctcggctcaccacaacctccgcccccgctgggttaaagcgattctcttgcctcagcctcctgagtagctgggattacaggcgtgtgcctccatgcctggctaattttatacagacggggtttctccatgttggtcaggctggtctcaaactcccaaactcaggtgatccgcctgcctcggtctcccaaaacacaggggattccaggcatgagccaccacgcttggccaatcgttggcattctaaggctttcagtgtacctgacttcttttagttctaagtctgtaactgttaacctttcttgggccacggctatcacacggatctctctgggaatctgacgacagtgcctcaaacccgagggagcaccgccaggtgtgcacacacgtttctgtcaacgatttcggaggactcttgggatccctgaacaccatctgttccatgggaccttaggttaagagcctctgttcaaaggaggcttttgctcttggtgggtggatggggtgaagtctccaagccctcttrcggscccttcggtattcctatnccccggttctgccctgtcttagtccagtgctctctatttaacaaatgagcagtaaatgtacaccgatggactttgggagacaataaagacctgatattcaattctagctccttaaaccacaggagaacattctttcagcagacaacttcagttggtattaggccaaggtaagaaaggccaacagcatccttttctgaagaaacctcaggagatggctctctgccagaaagctataacctggaaggggaattgtaaaatagatgaggggctggatgaaggacgagaccagggccccgtcacgggagagggaaggcagctcctggctgtgtctgtcccccggcttttgggctctgaaggactaaccacatgctttctcacttgtctcagattgcccagctgcccttgaccggaagcatgagtatcatcttcttcctgcccctgaaagtgacccagaatttgaccttgatagaggagagcctcacctccgagttcattcatgacatagaccgagaactgaagaccgtgcaggcggtcctcactgtccccaagctgaagctgagttacgaaggcgaagtcaccaagtccctgcaggagatgagtatgtctgaagaccctttcgctcttggtgggtggatggggtggggcagggtctttgggccttccactgtgctaagcagaacgcaagggctccacaggcttgtaggggggccgtggatgagtccttaatcctcatcgtgccagaagggaaggctgaactgccttctctcatcagactcattcctcagcctcacgagcagacctccctgacaggcgctcacaacactgcctctcaagacgagtctgtctgacctgttttctcatcttgacctaacttgctaaatgctcctgggcaagtcactccaccctcggtcagctcagacctcttcaggcctcagagaaagtcaacagtgctgcgccatcccagcttgcttgcaaagggatcccttggttggggtgttggggaaggcagggttttaacggaaatctctctccatctctacagagctgcaatccttgtttgattcaccagactttagcaagatcacaggcaaacccatcaagctgactcaaggtggaacaccgggctggctttgagtggaacgaggatggggcgggaaccacccccagcccagggctgcagcctgcccacctcaccttcccgctggactatcaccttaaccagcctttcatcttcgtactgagggacacagacacaggggcccttctcttcattggcaagattctggaccccaggggcccctaatatcccagtttaatattccaataccctagaagaaaacccgagggacagcagattccacaggacacgaaggctgcccctgtaaggtttcaatgcatacaataaaagagctttatccctaacttctgttacttcgttcctcctcctattttgagctatgcgaaatatcatatgaagagaaacagctcttgaggaatttggtggtcctctacttctagcctggttttatctaaacactgcaggaagtcaccgttcataagaactcttagttacctgtgttggataaggcacggacagcttctctgctctgggggtatttctgtactaggatcagtgatcctcccgggagggcg

SEQ ID NO: 104 - DNA, 1410 bp, Homo sapiens
  Genbank Accession No. AL133105
gagaaagccttgctgggggcatgtgactgcacccagattgtgaaacccagtggggtccacctcaagctggtgctgaggttctcggatttcgggaaggccatgttcaaacccatgagacagcagcgagatgaggagacaccagtggacttcttctacttcattgactttcagagacacaatgctgagatcgcagctttccatctggacaggattctggacttccgacgggtgccgccaacagtggggaggatagtaaatgtcaccaaggaaatcctagaggtcaccaagaatgaaatcctgcagagtgttttctttgtctctccagcgagcaacgtgtgcttcttcgccaagtgtccatacatgtgcaagacggagtatgctgtctgtggcaacccacacctgctggagggttccctctctgccttcctgccgtccctcaacctggcccccaggctgtctgtgcccaacccctggatccgctcctacacactggcaggaaaagaggagtgggaggtcaatcccctttactgtgacacagtgaaacagatctacccgtacaacaacagccagcggctcctcaatgtcatcgacatggccatcttcgacttcttgatagggaatatggaccggcaccattatgagatgttcaccaagttcggggatgatgggttccttattcaccttgacaacgccagagggttcggacgacactcccatgatgaaatctccatcctctcgcctctctcccagtgctgcatgataaaaaagaaaacacttttgcacctgcagctgctggcccaagctgactacagactcagcgatgtgatgcgagaatcactgctggaagaccagctcagccctgtcctcactgaaccccacctccttgccctggatcgaaggctccaaaccatcctaaggacagtggaggggtgcatagtggcccatggacagcagagtgtcatagtcgacggcccagtggaacagtcggccccagactctggccaggctaacttgacaagctaagggctggcagagtccagtttcagaaaatacgcctggagccagagcagtcgactcgagtgccgaccctgcgtcctcactcccacctgttactgctgggagtcaagtcagctaggaaggaagcaggacattttctcaaacagcaagtggggcccatggaactgaatctttactccttggtgcaccgcttctgtcgtgcgttgccttgctccgtttttcccaaaaagcactggcttcatcaaggccaccgacgatctcctgagtgcactgggaaatctgggtataggtcaggcttggcagccttgatcccaggagagtactaatggtaacaagtcaaataaaaggacatcaagtggaaaaaaaaaaaaaaaaaaaaaaaaaaaaaaaaaa

SEQ ID NO: 105 - DNA, 154902 bp, Homo sapiens
  Genbank Accession No. AC005799
gaattccacaggctcaggaccctctcctatttgtttttaatttcctgttgcctagcataggtcttggcctggcagatccagaaaatggcttattgagttaatgaaataactcagtaatccagacattcttggatcactatgttgggcttgaattgtttttcctgataacatttcttttggcaggagggtctcttgctatctgcagtagcatccaaaaaaacccaattttcaggattttgtcttgcagtgtgttactgttgtgtgcatcacagataattgttgtcaagacattaatgaatatctgatttgttactcacatgttatgtgagtactaatggcttgtactaatggcttttgcccattaataaaggatagcatctgttatcatctgaggtacattctgttgagagtgtttcaagtgttactctctttttttcccctttggaattggtgttttcctcttaacttacattgttaatggaagaagagattggaagtgactgagatagactatcattggaacatgagagtgccagctttacatgccgaaggatctcattttgcaaactcgtaatttctttcaggaggaggcaaaacagattcagaatctgcagaaagcaggcactcgtacagactcaagggaggatgagatttctcctcctccacccaacccagtggttaaaggtaggaggcgacgaggtgctatcagcgctgaggtctacacggaggaagatgcggcatcctatgttagaaaggtagttttgatatttgaatatcggggggatgcttttgggacccacttggtggtcatctagtctcctttgatgaatgaatcataaaatacaaaacagggtggaacttcatccatcctgtacaattcttgggtactggaaaacaggtttctgtaatagcatgctgtcagaggaaataactaatagtgattatgaactagtgaataattgcattttggggtttgttatttccttgcagttgttttgcagtagaaggaggtgggcggtattgctttttctcttgaatcgtgatgtcctttttttgctatcctattaaatgttgtggcttttaaccttttattctacgagcctcatttgtcctgtgttctcctcttcctcagagccaggctattttgagttatgctgttagccttaaaggggaacagaattgtcctggcacttgaggcttgtgaagctaacagatcacagatttttaaaatgactaattattataaaatacttagttttgcctcagaataatgaccttggtccaggtgttttgatttgtttctttagttgttaactgggaaccaagtaccagactttatatttaggcctggctgtaggcaaggggattaattagtcaatacttgttgagtagtttatggatcaaagatagtacaagtgtgttgtagtgaaacactacaaagcagtcttgtttaaataccataatgtggcttgacatttaattgaagcgcaggttgcaaacgtgaaatgtttttggtttatggaattgtcatttgaccttcagttcttttctaggttataccaaaagattacaagacaatggccgctttagccaaagccattgaaaagaatgtgctgttttcacatcttgatgataatgagagaaggtaggaacaggctctttcttaacactatttttcaagtaagggtgtgatcccaaattgttttcaacacttgttgcaagttttagagctcttagtaattgttcaccagatgacagtctggggtctttaattctaagcttaatgtttgaaattcacggaagagacatgtgaaatgtaacacgaggccttctctcttttgcagtgatatttttgatgccatgttttcggtctcctttatcgcaggagagactgtgattcagcaaggtaagggcctctggagcatgcaatattgttacgggagaggaggcgagactagaggatttttttggttttgttttattgaagtttgttttcctctttgatcctaccacttttttttttctgttatactattggatttttctatttcttttaaattaagattttctgagatggacagaacactttgtattgggaactaatatttttgatatagttttgtttataatttaaaggaaatgcctacattgtcttaccttgaatgtcatatagaattgcagaatcatatatatctctcatgttctttatattgttaatcacttttaaagtaagaaataaatgaaacacctacattcttcattgtatagccctgtctattaaaaaggttctagggcttctatagattcttactttgcctatatagactaacatggatctaactttttgactatcttcctctttttattttcttatttattcttgacattttatgagtgggtatatattttcattttgtggcagcctgataatttgttattaactatttgagttctttctaatgtccttgttataaatgccatagcagttaataactacacatatgtagcttttaaaaatttttttcagaggtattcttcaccatgagatgactaaaaaaattttgattaattctatgacttttaaaatatgttgcttgattttctttcccctgaaagattgtgttagtttgtaacacactctcacagtaccactgtaaaataagtttattgttttgtaataattttgataatttctttctttaatttggaatatgcttctaacttttttaccctcttttaggtgatgaaggggataacttctatgtgattgatcaaggagagacggatgtaagatttaccaatatcaaaaatatgttgatcttaaaagccaatgtattgatcgcttccgagcaataagaatagtgattttgaagggtcattacatcccttgtatgtcagattttattaataccttttgccaagtatttttatgacacagagaaactctttaaaggtaattttctgttcagaactttgctggagtggtggtgaagaagtgtgtgtagctgggtgcagtggccgatgcctataatcccagcactttgggagatggaggcaagagggttgcttgagcccaggagttcaagaccagcctgggcaacaaagtgaaacctcatctcttaaaaaaaaaaaaaaaaaaagattctagacccagccattagctagcaaaattaatatacctttcttattcacaaatgaaatggggacaataatagcattgatcttttaggattattagaagattcagtgacctaatgcaagtaaaatgtttagcatagtgctcagcacggttctctaagtatctgtgactggtattagtgcttagctgacctttttcccttacatccttacagagtgcttttttcttatcagataattaaatcaggtaaattatagacactcttaactcatttaactcgtcagaaatcacctattcttctctgttgtgtactgcaaacataatatattctgttttttaaaacaaagttcaggattgtgaccttttaaaaaggtttgagggtttttaacatttaagtgtttgtatctagaaaataaacttttttgatgtcacttgcactttaggtctatgttaacaatgaatgggcaaccagtgttggggaaggagggagctttggagaacttgctttgatttatggaacaccgagagcagccactgtcaaagcaaagacaaatgtgaaattgtggggcatcgaccgagacagctatagaagaatcctcatggtaagagaccatggtgtttgagagtgtgatttagaattctcatctacgtaactaatgtttgaatattaccaaattaaaaagagaatatttcttttaatgagcaaatatttctttcttttaataagcgaatatttctttcttttaatgagcaaatactttgcattaagcccagcttagcattattcattatgccattttaggcagtgatattttagaacaaaaccttgggaaacaagatctggtatatatgtgctggtcatctcatgtttggaaatctatccatttgctggtaggcacatcttaatttacctagttatacccattacagcatgataggtgctgcttttaagtgcttaaagttatttggggccattcagaaataatcagcttccctaacctgtgaaagtgggttatcagtaatgtatatgtatgtcatgtcccctctcgttaaaggaataaacaaaatactaaaaccattggaactttctggtgatagtcagattttttgagaacgttgtgataaatttataggatagctttggatgtttaagtctcagccaatgcattggtcatttttaatggttttcttaaatttgtgcagtgtccatctgaccatttgaaaatgtacagcctgatgtactttgaaatttttctgcatttgggatatatagatagattagattagatagatagtcttgtccttcgcagcaacatggatagagctggaggccatttttctaagcaaaataacacaggaacagaaaaccaaaccacatgttctcacttacagttgggagctaagcaatgagaacacgtggatactagaaggggaacaacaaacactggggcctacttgagggtggagggtgggaagagggagaggatcaggaaaaatacctgtggtgtactttacttattacctgggcaacaaaattacctgaacaccaaacccctgtgacacccagtttacctatataacctgcacatgtacccctgaaccttaaacccacacacacaaaaaaacgcttatggcaaagataagtctaaattttagaaagattggttttgaagtgatgtgacagtctactggagaagaaactgaccatacagttagttctgcatttcctctacaggaatactattagtaaaaggaaacatagaatgtttacagctttatctcattgtcaaagaaggaagaggtaggacctggaactattggtttgaaataaaatattttactttctcatagtgggcctgaaaggaaattagggcctcacaatgctttggctttgtggacaggaattaggaactgtagatatggggtgaaatatctatatagctgggtaggggaggatatggtcctttttttatagaataaagacatgtcaattgtataggtgagaagccagaactaatggaggaatctgcatttaaataccagcgttgaacaggaagaacactaggattattgggttgtaaatgacctagattacttttgtgagaaaatattttcagagataaattgggttggcagtggcacaaaatcagtttgagagtaaacatggaaattggacattggtttaaagtgtgtggaaaaatatcttgagtgataggctcaggtataaaccggtatttcgactgtatttggaagttgggaaatgctttgtgaaatatgtcaacatactggttgcaaatgctaggaattgggcataatattggcggaaaataaaaatcacaagaatgtcatatcattcattacctgtaaaataaaaatgaattagttaaaattaaactttcctcattaaaagcaacaagctttgactttctggttttaaaatttatttgaaacttaatatttattattccatagcattatgtggtgataattacacgtcttggggatatcacttttgttatttttatttttagggaagcacactgagaaagcggaagatgtatgaggaattccttagtaaagtctctattttaggtgagttgtaaagtgtgttaactttgctagtatgtgagatacccctgaattagaattggatggacttgggaaaagccttctgaaagtataattgctactcattccccctgaaaagacagaagggctgaaagtccttctgactgtggacattcacagttatttcctctgtgacttcccgtctctcttgttccatcattgagttgattggttcagaaaagtgagtacttccaacaatacatttcctctgtggaaagattaggtatcatttgctggcatcctctgaaaacatgccagaagtttgttgaaatttagagtaaagcagattaattgaagatattcttttgtgcattttgttatgtggacttggagatgttagaacttgttcttcatgaaaggggaatggggatttttataaggtaacaggcttctgccattgtttattacagtgaatttttcacctcttctttgtcttttctttgaattggttacatatgctttgtgttttggatagtagtttggccttggggaataaaagttattttctagttctttttcataaagtaaaccaagaatttaaatagattaaattatttctatgaaactttggaacgatatggatggggaaactatgacttttgagtattgtagttgtaggtttgatttgcattgatggcaatcttcaggaatacttaaggattacattttcttattcccttgccatttggtacagttggtataaattaacctagccactgggctaccgaagtaaggatctaagggctatctgcaggcagtatgagaatcctgctcagactagaggtaattgaagacaggtaccacttttaatctgagacactactagaatgttgaatgggcatggctatttggttgaatctctttatactttctttttacctttataacagcaccaaataatacagagcaattattttgattcttgtctttcagagtctctggacaagtgggaacgtcttacggtagctgatgcattggaaccagtgcagtttgaagatgggcagaagattgtggtgcagggagaaccaggggatgagttcttcattattttagaggtaaagaactcagaatttaatacttgaattttagaggtaaagaactcagaatttaatactttaaaaagttgtacgctctaagagggaaagagtgggctaattctgaactatagctttagtttttaagaatacctgaccattttattttaaaattatcttttactttgaaatgctgttgtttggttttctgccaggtcactatatttttaaatgagtttgagtcagaattcttgaagggccctagacatgaaaagccaaattctaaaaaccatttaacataacaaactgtgatgattctgcactattcttgttaaaatgcaagtgtttgggcaatttggcaaataaggattaaaggtaattatttaaatttgaaaaattactgtgtttgtatatctccacattccatggaaatgtatagcagatactcttgctaagcggatccaagtggcagatttctatgaatgtggctccatagttgctaattgattttatttaaatcaggggtcaggagactgtaaagggccaggtggtaagtaagttaagctttgtggaccatagggtttcattcgcaaagtctcaactcttgtcatagtgcaaaagcagccacaaataatatgtaaatgaatgtatgtggtatttcagtaaagtttgatttgcgaaagagacagtgagcttggatttagcccttcatctacagtttgctaacccaagtgtgcaccctttaagcaccttagcttgatacgaagaacctcgctagcaggagatgctggtaaaatagaaattgaagctcatgtggtgactaactttaaagtcattttttatcatatgcacacatttgcaaggtagttaaaattgcataggatgtttaaggtgccaccctgggtttgagagtgtttgtttgtttagctttttggtgattttattataggggtcagctgctgtgctacaacgtcggtcagaaaatgaagagtttgttgaagtgggaagattggggccttctgattattttggtatgtatgaattccctcacaataaatacatggtttctttaagtcacctctcagtgagatattgtagtcttccataattttgtcttctcctgaattttattttctaactgcagtcttttttggctctgagagggaaggtgtgagattttgatctttactcatttaatgaaattactgattgtctcatatctattgtcttctttctcagaagtgcactgctttaaggaaatgtttttcatagaagttagcctgttacccatctttgctttctccaggtgaaattgcactactgatgaatcgtcctcgtgctgccacagttgttgctcgtggccccttgaagtgcgttaagctggaccgacctagatttgaacgtgttcttggcccatgctcagacatcctcaaacgaaacatccagcagtacaacagttttgtgtcactgtctgtctgaaatctgcctcctgtgcctcccttttctcctctccccaatccatgcttcactcatgcaaactgctttattttccctacttgcagcgccaagtggccactggcatcgcagcttcctgtctgtttatatattgaaagttgcttttattgcaccattttcaatttggagcattaactaaatgctcatacacagttaaataaatagaaagagttctatggagactttgctgttactgcttctctttgtgcagtgttagtattcaccctgggcagtgagtgccatgctttttggtgagggcagatcccagcacctattgaattaccatagagtaatgatgtaacagtgcaagattttttttttaagtgacataattgtccagttataagcgtatttagactgtggccatatatgctgtatttctttgtagaataaatggtttctcattaaactctaaagattagggaaaatggatatagaaaatcttagtatagtagaaagacatctgcctgtaattaaactagtttaagggtggaaaaatgcccatttttgctaattatcaatgggatatgattggttcagtttttttttttccagagttgttgtttgccaagctaatctgcctggttttatttatatcttgttattaatgtttcttctccaattctgaaatacttttgagtatggctatctatacctgccttttaagtttgaaactaactcatagattgcaaatattggttagtatttaactacatctgcctcggctcacaaattccgattagacctttatccagctagtgccaaataattgatcagatgctgaattgagaataagaatttgaggtctacattcttggttgttaatttagagcgtttggttaaagtatgtccttcagctgactccagtataatctcctctgctcattaaactgattccaggagattggatttgctgtgactagatacagatggagcaaatgtcctaacagagaaatagaggtgatgctgctaaagggagaaatgccaggcggacaaagttcagtgtcgggaattttccccgtgacattcactggggcatgagattttggaagaagttttttactttggtttagtctttttttccttcctttttattcagctagaatttctggtgggttgatggtagggtataatgtgtctgtgttgcttcaaattggtctgaaaggctatcctgctgaaagtcctgctttcctatctagcatttatttctctggcaaacttttctttcttttcttttttaaagtaaacttgtgtattgagtcttaactgtatttcagtattttccagccttatgtgttacattattccaatgatacccaacagtttatttttattatttttttaaacaaaatttcacagttctgtaatgtaggcacttttattttcattgtgatttatatataaggtaatgtagggttatatttgggagtgactgcaagcatttttccatctgtgtgcaactaactgactctgttattgatcccttctcctgccctttcccaggtaatttaaattggtcatggtagatttttttcatagatttgaaaaacttttaggttgttaccaagtatgaagtataaatctggggaagaggttttatttacattttagggtgggtaagaaagccaccttgttacaaattttttaatttccaaaataatctatattaaatgagggtttctgatctgtactttgtgtttagctacctttttatatttaaaaaattaaaaatgaaaattacgttcttacaagcttaaagcttgatttgatctttgtttaaatgccaaaatgtacttaaatgagttacttagaatgccataaaattgcagtttcatgtatgtatataatcatgctcatgtatatttagttacgtataatgctttctgagtgagttttactcttaaatcatttggttaaatcatttggcttgctgtttactcccttctgtagtttttaattaaaaactttaaagataagtctacattaaacaatgatcacatctaaagctttatctttgtgtaatctaagtatatgtgagaaatcagaattggcataatttgtcttagttgatattcaaggctttaaaagtcattattcctgggcttggtaagtgaatttatgagatttactgctctagaaagtatagatggcgaaaggaccgttttgtattgcttcctgattaccagtctgattataccatgtgtgctaatatactttttttgttatagattgtcttaatggtaggtcaagtaataaaaagagatgaaataatttaaattcttaaatgaatcagtttttcttccctttctcctttccgtctttcctctctctgtccttccccgaaagtctactcgggtgggcaaaaatgaaaagggggaaagtgaattatgggatcggtgttttgaaagagcaatgtttattttcagtgcttttcagtttgtcaaagagtggatctcaaaatcttgcttaaagggtaattgagatgtagcagatttatttacttagtcatggaaagaaaaaaattcagtcaaaagctaaagatttccttttgattgaagacagattggttctgtggccttggaactttcccagacttaatggggaaacatcatttctagattagcatactctttggtttaaatttaatatatacatttaatgttacttagggatacttttatattttgcatatataaagcctcatatataaagccttatttctgatgctcttagatttctgaggagtgagatgattaagttgtattcattagtgtattggtatttcttcacatccagtgaaattggagatatgttgtatgttagaagagcattctttaaattgtgttgctttgaacatgtgtaccttttctagattcagtaatcccttccccccgtcctctggagtatgaaacctttagagtcacaataaaatgtaactaaagaaaatttctctgggttgacagtcctggttatagttgaattctctctaaacagtggcccaagtagactcttttttttgtttcttttattttttaatgatttaaatattgacatttaaaaattgaagtagcatgtcagttttcttcatactactttatctctaaccacaaataatagctgaaccttttgtacttatgttaggccctggcagtatatgtttagatgggctaagacaacatcaagaagcaatggctagataaccatttaatttgtccccaaaggtacgtttttatctgtctatttgtctatttatcgatctgtctatctaagatggtctcactctgtcacccaggctagagtgaagtggcatgatcactgcagcctctctgcttcccagattcaagtgattcttgtacctcagcctctggaatagctgggactacagatgtgtgccatcacacccagctagttttttgtatttttagtagaggtggggttttgccatgtagcctaggctggtctcgaactcctaagctcagtttgcccaccttagcctcccaaagtgctagcattacaggtgtgagccagcgtgcccgtctcccaaaggtattattataatagctatcagtaaacgctgtagctatgtgaatttcttaaatctcttccttcctatgctatgtgatttttacatagaaagcagcattgttatgtacatgtaccgctaacatttgtttcttgacataagttcagagctgtgacttcatctggactacacctaaaaccaaaaccactgagtaagattttttcattttgtgaaagttctgccaattttgcttaagtagctgtgtgattttaaaggttgccactagatggtgggctttttttaatcttcgttaatctcaaatgagttaactgttgatccttatcattcatggattctgtatttgtaatttacctacttgctaaactttatttgtaaccccaaaatcaatagtcacagggcttttgcagacatgagctgggaagtgaaaagtttgagcctcccaacacacatgttcccaactgaggtggaacaaagggatgctcatctttcatactgtgaataagtgtccttttcttgggtctttttagtgcctttttttttttttttttgcatttttgtattttttttgttgttggtgatttcactattaaaagcccctaagtgtagtgatgaagtgctgactagtgttcctaagtgaaagaaggctgtgttgtgccatatgtagaaaatatgtatattggatgtttcttttaggtctgggttacagtgctgtttgccatgagtacaatgttaatgaatcagtatatattaaataaagtgtcttaaacatgcgttaacataaaacacgcacacagcaagattatgtattgatcggtcaataaaaatgtaactagagactcccagcaacctaaccctgtatttcccctaggagcaatgttcagtatttgccaatgcagtgtttgtggtgactttatggaacataaaactaactcgtaagagaatgactaatttttttgtaatattcaaactcatattgtgttcctggcttttgagaaggctaaaacgaattcttccaaatgcctctttccatcagtacagttcccgttcattttttagtttgctgtcagtagtaacttgaaaagttctcagagtcaagagactttttatttcatgggaggtaaacagttcaaaatgaacatgctggaagaactcgagtaagaatgaaacggttggttttctgatatttttgagaaatgagtcttaattttgttactaatcaaaaagtaatggaaggttgaaagataagtgaataataaggtaggtgtaccacatatcatggtgaaattcaagcctattgctttctgtttgtagagtgcagcaaaatgtgtatataggccattggaaaaccagtccttcgttataggaggtggcgggttttgaggtagagctgtagcctgctttcctgagagtcttatttggaagtcccaaaccattttgtgctattctttgaatgtttttacccagatattttcccatttctgtgtgtgatctcctggttcttcatccacagggaagaaacatcttgaagcaggagagacagtgaatgaagtggggagccctatgctgcagtagggccacaacagttaaggaaatctttgggattaaggtttctctgttaaagagttgatttaaaaaaaaatttttttttttttgtatttttttgtagagacagggttttgtcatgttacccaggctggtctcgagctcctgagaccaagcgatctgcctgtttaggcccaaagtgctgggattacaggtgtgagcccatgcccagctgattttttttttaagcaaacaaatttgacttcataaattgggtgggatactgttgggttttgtgttacagtgaaaagaagactttggaataggtctaaaccactaaattgtgtgattttgcttactctctctgagatttaaagttcttccatgcacattggaggatgggggttgtatctgtgtttgagaggattggaaacctgtgtgttgcttctgtagcgttggtgagtgcctcacctggtcagatctcagtgaatggtagtgattttagagagacacaaagtccaggggcagcataccagtcatgtgggggtaccacggggtcagaagtgttatttgtccagtcgaggctatctttgctcacactgcagaaagcttggagacatttctggttcttgaccttgtactctctttagtgacagctccattctattctcatgcttacagtatttgaactctggcctttactggaaaagttgatttgatgaaatgaggcatttttacttttgttgactgactagtcactccatggaatgaagaccttactgtcctttgtgttttcggtcattaattatggaataagaaacaaagcctcctattaaaaggagtttcagatatcaacaagtcagggagaaggtagaggagacaaggaatccctactacactttcttctaagggaggcttcaataaaaaacctgacttagtcttttttgagccagccgtcacagggaggggcatctagagggcctcacctttccacatagcccctttcttcttttggggatgggccggggacaatcctggggtcttagggaagaagattgtggttggtgggctgtagtcagccttggctcttttcctgccttactccaggcttgtgtccctgctaggcctgttcccatgccatcctgaccttggaggactttcctttttttttccttcgttgtaattatttattctgttactggctgcttagtgtgacatatttgatgttatttcaattgtaatactcttcaaattggaacactccttttctgatattcttagcaaatccctcttttatttttgccacttgttataatatctctaagaagttactccaggaccgggcagtagggattactgattcagatgggtccagtgactagaatatgagtagaaagtgtgaggtctaatttgaacctgtcagagttactgttgcctgcgctggcccaaagtgcagatttttagtcagcttgtgataggccaggtgttttgtctggaccaggagttatctttgacttgtagctagaataaggatcctgagaagtcaggtatccacttgatgtccttttatttgacttgttaccattagtactctcctgggatcaaggctgccaagcctgacctatacccagatttcccagtgcactcaggagatcgtcggtggccttgatgaagccagtgctttttgggaaaaacggagcaaggcaacgcacgacagaagcggtgcaccaaggagtaaagattcagttccatgggccccacttgctgtttgagaaaatgtcctgcttccttcctagctgacttgactcccagcagtaacaggtgggagtgaggacgcagggtcggcactcgagtcgactgctctggctccaggcgtattttctgaaactggactctgccagcccttagcttgtcaagttagcctggccagagtctggggccgactgttccactgggccgtcgactatgacactctgctgtccatgggccactatgcacccctccactgtccttaggatggtttggagccttcgatccagggcaaggaggtggggttcagtgaggacagggctgagctggtcttccagcagtgattctcgcatcacatcgctgagtctgtagtcagcttgggccagcagctgcaggtgcaaaagtgttttcttttttatcctgaaaagacaaagttacaggaaccaaataagcaaatgtaaagaaaataacttgcctgaacttctttccccacaaacagctgttgtagctgatactgttggcgcctctccttgtgtcttctcaggcacattttaatggaaaccaggtaaaaagggaacaaatgaaaggcaaaatccagtatcctgcagtcctttgcccaattgcgatttggtcaagagcctgcatagccatttgtgctctaataatggtgatgctgggctatatgcattttctctgacaacgctaagggaatcaaaaccaaagtgatacttaggatttttcaaggagatttaaagctaatgggagaagtttctagtaggtgaattgatgagctatttgctgtctcaaaatcccccagtactgccagcctttaagttgtttcttgctaactttatttctgtttgtcagattttaaaatcacagagatgaaaatgtggtaggacccatctttaggatttcagtttctttttatgtgggaatctgacttggactctgatgtgtaagcagcttaattgacttttgtcaaaaacaggtactgctcatccagtcctgctctggaggcagggaagggaggccagagggaagcatgtttaaattaacctaagacatagatgaggaatactcatgctctactccgagttttccagctggaaacaaatgagatgtttttgctaggtgtgaatatcatatttataattagctctgcatactgcagctgagcaggtggtcaattttacaagcctggctgaaacactggagaagtgtggaagtaagttagacattctctagagaaatggtggccaagcaagggccttcgtgccttcttccagtctgcacaggtttacaggactttaatcagggttttgcttagatggtgatcaagtagtaatatttatgagccgatatgaatgctgggcaaagcagaggtctgattagtaatatcaaaacccagcagactgcaaaaataggtgattatctgagtgggtcaacgattaaagttggcaattgaaaggtttaaaggattaaatcctaattcatcctatgtggaaggatgaaaaagacaaaacgttgtgggggaaattttgatagttgtagtacagtcatgaatcgcttagtgatggggatatgttctgagaaatgtatccttaagcgcaggttttgtcacggtgtgaacatcagagagtgtactcacacaaacctagatggtgtagcctcctgcactcttaggctatatgataactgcttgtaggctacaaaacctttacaacacagtggtggatagctgtgtatataaacatagaaaagatagtaaaactgtaaaatgcagtaaaaataccatattattaatcttatgagaccaccgtcatatatgcagtctgtcattggctgagatgtcatgcagtgcacaaatgtgtaggaaataaggtgattcatgtcattctacccacttacgtcctggaccagtgaaaactggaagcccttcagaccttggctgcaagcagcatgaagggtcacaactgttacttgcccgtattatctgctgcaggaaaacttacatgcagcactgggagagaggcgagaggatggagatttcatcatgggagtgtcgtccgaacctaggaggagaaacaggcttttatgggtggccggcagcatcctttgcattcccctgaggcttcctctctcctctcagcattttgtgaatcagagattggggtaaaatgccagggatcatggcagctgcctctccagcccctctccccagtcagatcacaaaagcatctgtacagagatgttagagctaagcaatccttcattcattcattagctgcagagggccagccactgaggatgcaccttgctctcgaaaacctcaccctatttcactagagggcacacgagtgctctcaggctggaggaggatcaagtggttcttgcaaaggtaaagagaaagaaggaaatggaagaagccgggctcgaaggagacaaggcacgtggtggtggaggccctcatttgcagggcgtctgtttcccccgagcagctggctgcacagagcagcacatctgggagaggggattgttgaacacacgtggggaagctcaccctctggcgttgtcaaggtgaataaggaacccatcatccccgaacttggtgaacatctcataatggtgccggtccatattccctgtgaaggaggggaggacttagctggaaccagcaggccagggggacaggtgctcctgacctgagttctctccagggaacggaggcctgtcatcacttgagagacaggggtctgaacgaagctgggcctcacactgtcatttcctcagggccatcagtgaagcagccgcaggagggagaaggaagcgaaacaagcaaaccctaaatggactggcttcaagtctaaggctttcacccctgcccctgcccctactccagcctttggccagagatttgaatgtgcagaaagtcatcttttcacctcgtgtatgtattgacattggctttcctcagcccagagatcctcagctgatcctggttatagtaaacagacacagctaaacttcctgaaaggcacgatgatgagccagctgtctgacttgcttccgacctaagctcctgtatgacggccaccttcataagtgtctcgtctccctagaagtccctgtgggcctggaaggtggaattactagtcttgtgtgtccgtggcctcgcctgaggccctccctgctacatatttgtgtactttcttcccttcctacctggtttcccctcacttggtgaagtgaacatacagcttccaatctgacgcccactcaggcccgtggcagggtgagatgcctgccttatgagtgacgaccccttgagcttcttccagttctttgaagagaggggagcctgttaccttctgtcctctgggacctccgccacttctgaggctgtgggaggtgcagagttactcagtcctcatgaaccaggttgtaagtttgtgctcaaggtcacggggaaccctagccacatagcagagcccacttctgctgggggcctgcgtgtggggacctacctatcaagaagtcgaagatggccatgtcgatgacattgaggagccgctggctgttgttgtacgggtagatctgtttcactgtgtcacagtaaaggggattgacctcccacctgagggggagaagaagtcctggggctggaaaagccaagatggcagggtgtcgggggtctccccacacctccccctgcccccccaatccctgcctccctgatcctgccctgggctggtggcagcttctaaaattcagaaaggccctgggcaaggacgcgtaaggctgcatattccgtgtggtgagaaggtcctgggtcctttaagtctggtggacactaaacccatggttgggatactgtgtgccagaggggagaggccggggcaggcaggaaaggaggaggtagtgaccctcacctgcttcctcgtccctccacagtccctctcaccaagcctcttggaccctgcgccactcatagcacctccatgggctgttcctgccctttctctctcacacatggttttctgcctacaatgctccgatgcccattttcatccgagggctcttctcagccttcacagagtcccttaggatctgtcatgtcctccagaaattctgcctggttacttcttttcccacgatgatcatgacggcttgactgatggatcgattcactcagtcagctagtgtggagtacctgctatgtgccagggagggtgctaggtcctggggatacagcagtgaggtccttggtctcccagggcttgctcgggaaccaggtgtccctcccatgggattctcgtgtgctccctggttatagcaagtgctgtgctgtgttttcgtgatctggctacatgtctgttctccccactagaccaaggagcttctcaaggagagagtctgagtcttccatttctgtatcccataacacctagtgttgggtatatggaaggttctttagaactgaataaatgaactaaaggggagaacagacccaggcctgctgatcccaggatcaatatgaaatggggcaaaggagtattgaggcagcttttcagattcaaaagccaagctagcaacaagtccctggtacagggtctgtggctactgtcaaggactgggctgtgtggcctggggaccaactcactcctcttttcctgccagtgtgtaggagcggatccaggggttgggcacagacagcctgggggccaggttgagggacggcaggaaggcagagagggaaccctccagcaggtgtggtttgccacagacagcatactccgtcttgcacatgtatggacacttggcgaagaagcacacgttgctcgctggaggatggggaggagagaggaggagtaagtggagggctctggaggcatgacatcttcctggcctaggaaatccactgggagggaagggaaaccctgaactcacagctcgggaagagaaagaagaagaaggaaacattgacttttccagaagtgagggtgtgaatgctactaagctgaacctcctgggaacctgctttcaaatgtcccaaccttactgcattctatccttatgagtagaacactctttattaccctgggtggataacctctggttccggggaggccagcattgtagggtcaatgcccacacagactaggtagcatctcaaacacaacctttcccatccagttcatcttgtgttatggtcaggcagaccatggtgggagtgtcttacaacttcatacgcccatcccagtaatggatagtgctagcagcagggtgtcaggccactgatgaatggaggggtggacactctggcttacgatctactcagacccggaatatcactcgggccagtactctacctggagagacaaagaaaacactctgcaggatttcattcttggtgacctctaggatttccttggtgacatttactatcctccccactgttggcggcacccgtcggaagtccagaatcctgcaagagaggaagctctgttccatctgagggatgatcagggagtgaggaggaggggttttgtcccccggccagtgcacattaggaattggctggtgtacccaggagggtggccggtgaggcgtgactctgcactgttgagctggtagtgcccaggtcaacactgggcctttaaacctaggtctaaaggagtggagatggagttgaaaatgaatccttattccgtcaagcctcctgggcaaaccttcccaccatcccaactctgttcttggtcagtgcttctcatattttaatgttcctgtgagtcacctggcaatcttgttcaaatacagggtctgattgagtggttctagggtggggctgagatttcttatttctaaaaagcttcttggaagtgcccatgacgctacagaccacactttgggtagcaatgactgagcaaatagagggagtggaatgtttaggaatgtgctttcacctaatatcataacagtgagactccttggataaataggagtgggtgcattctcctcgctctcagatcaggaaactagagcaactgccccaagcagcatggcgggaagcgtgttctttgtaaattgttcttttcgttacattcgttaaaaggccttgtgtttttcaatctggggggttgcatgggacattttgagttcaaagacaccacgatgaggcacgaagaagatagaaagccagaaggaagaaatgccagggagttcccaccttgagggtctgtctagccacccctcccagaggattggtccttataggcaatgccatctccatggggccagaccctacctgtccagatggaaagctgcgatctcagcattgtgtctctgaaagtcaatgaagtagaagaagtccactggtgtctcctcatctcgctgctgtctggaaggaaggaaggaatcacgccctggactcagacttcagctgggagcctgagaagagagctgatgagcatgaccagcgagaaaggaaaacgggcttttatgcttttcatgtacacacaggcgatggcacggcaagtcaggaatggcctgtggctcccttcgccaggagaagacaagcaaagtgggaggagacaggcttcttgcaagacactgtcctgcaggcaccaccaataccaagtttcctgcttaagaagctttggtgacagtggctgattattttcaaaacccagcagttgagagggaagaaatagacattcttctgcaggtataaacagaagagaggggaatggttagcagaaccagaggtagtgcagatccagatgtccaaggatgaagaaaggtggggtatgagccaggaattggtaatggaaaagtggcccagaaatgcaacttagtatgctggggttgaagaacagaaaagttctgggtcttagggggatgtgggggaaatacgtggaccatcatccccctcagagaaacacagccggatcatgagggctgggggcagctggtgcagaggatattgatttatatacattaaatctctaatgaattcctgaaaagcgccaggctgcctgagagtggtggggcctgctgggtgtgtacattcatgaaagtgctttttaatccttaagggccttgtggtgtgagttctggcctctaggctgactttgcctcgaggctaataaacatggaagaatgatgatcttcgaataattttataatccactgtgtgggactgttgaaacgactgcaaggcgatttagatgtaaataaacgtgatgttgcagaaatctataaataagaagcactggcaatttaaaccgtgttgtgcattttgccaaaaaacacgagtgagtcctggaaaccacagtgaggtgctgccgaaagtagagattctattttaaaaggtgcagccaccgttacagcacaaccctccgtgctcaggcctggccagcttatcatcatcactggatgtccaggctagcaaggacaatccctcttcccagtctcattttaattcctgagtcccatctgtaggaacatatcatctttcagacaccttttaggttcttctaaaacattttctcatttttgtatgatgtaagataagaagtaattttaaattcaaaggttgtttttactttagatcagtgcttctcatactttgagaagcactaatgcacgtctcattgcacattatattgtatacattacattttaaaaatataaatctttatgttcctaatgtatattttccaaagttaaagttctacattctctctttaatcagaaaaaaatggtgttcgccttaaattacttacagaaaaatacaaagcgcataatttttcaagagatacattttaaaatgatagtattttagatttgggactgaattttataaaaatgtagattacactgtgttatggtatgaaaatagataaaattggtcctgtcactgaatgttggagggttttgcattgtatttcggaaaaaagctggctagttggaacaatttttgtatagacacacttcggagatattgcaggtttgcttctagaccaccacaatgaagcaaatatggcaataaagtcattcatgcacattttttggttccccacccaaggcatataaaagttacgtttcattatactggagtccaataaatatgcaatagcattatgtctgaaaaatgtatacatcttaatggaaaaagcactttattgctaaaaaatgctaacactcatctgagccttcagcaagtcataatctttttgctgactgactggggtggtggttgctgaaggttggtgaggctgtggcaacttttaaaaataagacaataatgaagtttgctgcatcgattcacaaaagatgtatctgtagcacgcaatgctgtttgatagcattttacccaaagtagaacttctgtcaaaattgaagtcagtcctctcaaaccctgctgctgctttatcaactaagtttgcataatattctaaatcctctgtggccatctcaacaatgttcacagcgtcttcaccagaagtagattctatctcaagaaaccactttctttgcttatccataagaagccactccttattggtcgggtgcggtggctcacgcctgtaatccaagcactttgggaggctgaggcaggtggatcacgaggtcaggtgattgagaccatcctggctaacacggtgaaaccctgtctctactaaaaatacaaaaaattagccaggcatggtggcgcatgcctgtagtcccagctacttgggaggctgaggcaggagaattgtttgaacccaggaggcagaggttgcagtgagccgagattgtgccactgcactacagcctgagcaacagagcgagactccatctcaaaaaaaaaaaaaaaaaaaaaaaaagcagcaactctatctgttcaagtttgatcatgcagttgcaacaattcagtcacattttcagactccacttctaattctagttctcttttatttccacatctgcagttaccttctccactgaagtcttgaacccctcaaagtcatccatggggattgagatcaatcttcttttaaactcctgttaatgttgatatttttacctccttccacgcatcacaaattttcttaatggcatctagaatggagactcctttccagaaagttttcaaatgaccttgcccaggttcatcagaggaatcactaactgtggcagctatagccttatgaaatgtatttcttaaattgtaagacttggctgggcgtggtggctcgcgcctataatcccagcactttgggaggccgaggcgggcggatcacgaggtcaggagatcaagaccatcctggctaacacggtgaaaccctgtctctactaaaaatacaaaaaattatccgggcatggtggccggcgcctgtagtcccagccactcgggaggctgaggcaggagaatggcgtgaacccgggaggtggagcttgcagtgagctgagattgagccactggactccagcctgggcgagagtgcgagactacggctcaaaaaaaaaaaaaaaaaaaaaggtaagacttgaaagttagaatgactccttgatctgtgggctgcagaatggatgttgtgttagcaggcatgaaaacaacattagtctccttggacatctccagcagagctcttgagtgactaggtgtattaccaatgagcagtaatattttgaaaggaatctttttttttttctttttcccctgagcagtaaggtctcaacagtgggcttaaaatattcagtaaaccatgctgttaacagatgtgtggtcatccaggctttgaggctccatttagagcacaggcagagtaaaatttagcatcactcttgagggcctgaggatgttttgaatggtaattgagcattggcttcaacttaagttcccagcgacattatcacctaacaagagagtcagcctgtcctttgaatctttatcattattattattatttttttattatactttaagttctagggtacatgtgcacaacatgcaggtttgttacatatgtatacatgtgtgttctttgaatctttgaagtcaggcattgacttttcttctctagctatggggaaagtcccagatggtatcttcttccaatagaaggctgtttcatctacactgaaaacctattgttagtgtagctacgttcatcaatgatcttagctagatcttctggataacctgctgcagcttctccatcagcacttactgcttcaccttgtacttttatgttatggagatggcttttttccttaagcctggtgaactaacctctgctatcttccaagttttcttctgcagctttctcacctgtctcagccttcattgaggagagttagaaccctgctctggattaagctttggcttaagggaatgctgtggctggtttaatattctatccagataacttaaacttgctccgtatcagcagtgaggctgttttgctttcttatcattcgtgtttagtggagcagcgcttttagcttccttcaagaacttttcctttgcattcacaacttgcctgactggcacaaaaagcttagcttttggcttattggctttcaacgtgccttccttactagcctcctgaataatttctcgcttcccatttaaagtgagagatatgacactcctcctttcatgtgaacacttagaggcccttgttgggttactaactggcctcatttcaatattgttgtgtcttagggaatagggaggcctgaggactgggagagattgggggaacagcaagttgttggagcagtcagaacacacatttaggccaggtgcagtggctcacacctgtaatcctagcactttggaaggccaaggttggcaatcacttgaggccaggagatcgagaccagcctggccaacacagtgaaaccccgtctctactaaaaatagaaaaaattagctgggcatggtggcacacgcctataatcccagcactttgggaggctgaggtgggcggatcacctgaggtcgagagttcgagaccagcctggccaacacggtgaaaccccgtctctactaaaaatgcaaaaattagccaggtgtggtgggcagcgcctttagtcccagctatttggaaggctgaggcaagagaatcgcttgaacccaggaggcagaggttgcagcgagctgagattgaaccattgcactccagcctgggcaacagagtgagactctgtctcaaaaaaaaaaagtttgaaatattgtgagaattaccaaatgtgacacagagacacaaagtgggcacatgctgttgggaaaatgacaccgatagacttgcttgatgcagggttgccacaagccttcactttgtaaaaaacctagtatctgcaaagtacaataaagtgaaacgcagatacagcgagctatgcctgtatatttttttttttttttttttttttgagacagaatctccctctgtcgcctgggctggagtgcagtggctcgatcttggctcactgcaagctccgcctcccgggttcacgccattctcctgcctcagcctcccgagcagctgggactaccggcacccaccaccacgcccggctaattttttgtatttttagtagagacggggtttcaccgtgttagccaggatggtcttgatctcctgacctcgtgatctgcccgcctcagcctcccaaagtgctgggattacaggcgtgagccaccgtgcccagcctgcctgtatttgttttaactgaccaggcagagatgtattaggctgtgagttatgttaatttattttcctgcaaaggaaatgctacaggttctagcagtttttcctccctgatacaaaagaactgagagtggagctcatccattgcatattagcttccagttttaaaaaatgagaggcatccggccaggtgcattggctcacgcctggaatcccagcacattgggaggccaagacaggggaatcgcctgaggtcaggagttcaagaccagcctggccaacatggtgaaaccctgtctctactaaatatacaaagttagccaggtgtggtggtacacatctataatcccagctacttgggaggctgaggcaggataattgcttgaacctgggaggccgaggttgcagtgagccgagatagcgccactgcactccagcctgggcaacaaatgcaaaactccatctcaaaaaaaaaaaaaaagttagagacatcctattgtgccacataaaaattttgctcggagaacagaatctatggacctggtgatttgtggtgcgtttgcagatttatcattacttttatgcttctcattaacatctcctgtttctctatcagtattccttaggttgcctctctctaactggggctgtcttttgagtatatattatatgtgctcgactaactgtaacaataatttaaactctatgacaaccagaacctcactggtgactcttgtgttcagctgagcattgtgccaaagagtcacatgtctacttgtggaacctctgctaattgccatgtgtatttgctgttatagctctcatttcaaaggaacacaatgtatttatttacatattttagtaccctatatgtctgaatacaagatgaggtctctcctgaaattgtcccttggaaaggagtctctatattcagtcctggcatagttagccaaccactttgttttgtttgggacagatacattaacctggaatgacttgactttgcgctggttttactgcctagtgtaaccggttacaacgggttgatggtggtgatgggggaggggagtggggaaataagttaatattgatttgacattcacccccaacttgactctaagtgatgatgacaaccaattccccaaatttttgacaagtaaaatctacagtgggagaacaaaagcaatatttctaaatctatatactgttttatatgatgggattttaaaatcaatataaatataagcagacattcaattgtctcatgtacatttctggagaattttaagttgatctaacaactaggattttggatctttcacataggaaaaatgggggaacttttttttttttttttttttttttttttttagatagagagtctccctctgttgcccaggctggagtgcagtggtgcgatctcagctcaccgcaacctcctcctcctgggttcaggagattcttctgcctcagcctctcgagtagctgggactgcatacacgcaccaccatacctggataatttttgtatttttggtagagatggggtttcaccatgatggccaggctggtctcgaactcctgacctcaggtgatccacccgccttggcctaccaaagtactgggattacaggtgtgagccatcgtgcccagcagaggaactctttatacggcagtggttctcaaggttgcctgggccttgggatcacggggagagcccccagagctagtccactggactccctgagggtgggactcaggcataaggatttttaaagcctccttaagtgaatctaacatgcagctgatccactccaaccccttctttaaggaggtgctttcgccaaagcagttgggactgaaactctttattcggtgcttattcaagtaggccctgcccttagaaccatctactggggctctcaatgggcctccccttgaatggctgaaggtttggaatctgccagtctaattgtattccactggaagaagcacattctggaggaaagcatgacttgggtaacgtggcccctcttggggcgattttcttttctgcaggtcacctcatcatctcaaggaggagcattcccctgggctaaggcactggggccgaactctaggagaccctaacctgtgggctgcagatcctttgggggccagaaacccaaactcacaccaagctctgtctaaggactcaatacatattatttcactcatctctatgtttcacaaaattttcaaggcatgtagttgctgttgttatgaataaaatataaattaatgtaaacatgtaattgacttcctagtagcctttcttgattgtctagtttttcagttgaaacaagtattgtggtatacaagtccgtaaactttttgatgtcaaaaagagagtgctttccctggaaaaaagtatggatcaattaaagtggtggagtgtgaacttagcaacccagatgcctgggtttgaatcctgggtctgctgtttgcagctggaagattgggatgagatggtctctttcagcctcagtatctttatttgtaaagtggacattgtaagagtatctggctcataagcttgcccgtgaaccaaggacacaacttaggtcattgtgtggcatagatgatagtaagggcctgaaaaagacaagctcttagtattttcaattattattattattattattattattattattaatcaccccaaacagttctgtgcttgggcagattagagaatctctgaataactggcagaaagactttaggtcacttttattagtttttggtccaaatcttcccagggccaccccaactgggtgtggaaaggaggaaggcagtcacttacctcatgggtttgaacatggccttcccgaaatccgagaacctcagcaccagcttgaggtggaccccactgggtttcacaactgtgaaaggcagaagggtgagttaaccatgcttccgggcctcagccaaggcttgtgactctgttccttcaataagcccagctgacttcgctttcctcttatgtaatgagaccctaaagactaggatgtgctctccatagcctgcagggtaaacgccatggtgtcaggccgtagtgacggtgtccaggggctcaagacagtactttttactttgggaggtgaaggcgggaggatcgcttgagcccaggagtttgaaaccagcctgggcaacatagtgagacctccattttgaaaaaaaaaaagtacattttctgctggtatgggaaaagagcaaaaaatacaatgaagacatttactgaaaaccctgaagaatgttttcctaagaagaatgaaccctttcctctttgtgtttcaactacatctttgtagattctaattatgccttctgttatattagactagtttgtttatgcctctttctacttaagactgtacacctgggctgggaccagggcttggcaagtgagtgcttcttaggtgcagggagtgctacttccttaaattttgcatcctgggcacctcacttctcttaccctctccctggttctggagggtcaggacaatacctcactcaccttgtgttctataaaatggtcaaggcaggtgcttaactgaagaaaagggaagcctggagccctgtaaacctttattttcttttttttttttttttttttttttttttttttgagacggagtctcgctctgtcgcccaggccggactgcggactgcagtggcgcaatctcggctcactgcaagctccgcttcccgggttcacgccattctcctgcctcagcctcccgagtagctgggactacaggcgcccgccaccgcgcccggctaattttttgtatttttagtagagacggggtttcaccctgttagccaggatggtctcgatctcctgacctcatgatccacccgcctcggcctcccaaagtgctgggattacaggcgtgagccaccgtgcccggcctaaacctttattttcaaaccttagtgatatggttaggctttgtgtccccacccaaatctcatctcaaattgtaatccccttgtctcaaatctcatctcaaattgctgagcgagggatgctgtgagaggtggttggatcatggggcagcttcccctgtgccgttcttgtgatagtgagttctcacgagatctcatggttttataaggggctcttccccctttgcatcctctctctcctgccaccatgtgagatgtgccttgcttcccctcccccttctgccatgattgtaagtttccggaggcctcctagccatgcttcctgttaagcctgcagaactgtgagtcaattaaacctctttcctttataaattatccagtctcaggcatttcttaagagcagtgtaaaaatggactaatacattttgacacacaccatcagatgtagtcacatgtagacatttctgatgtgtgttccacatattgaagtaaagggatggggccactcatggctggtgatgactggcctgagggctttagggtccagacccacctataaccaggtcacagcactcctggaggggagctctgccactctcagtcctagctttttgatgccattaatcacttatcctagtgagtctcaactctggctatattagaatcacctgggcctcaccgtctgaacttgaatcaaaacccctgggggtggaggctaggcaggagcactttttaaagctcccccagtgattctaatacatatatatacacatatatatacatatatatacatatatacatatatacatgtatacacatacatatatacatatatacacacatttatgcatatatacatagacacacatttatgcatacatatatacacacatgcatatatacctatatacacatatatgcatatatacctatatacacatatatgcatatatacatatatacacacatgcatatatacatatacacacatatatgcatatatacatatatacatatatacacacatatgcatatatacatatatacacatacatatatacacatatacacacatatatacatatatacacacatatatatacacatatatgtatacacacacatatatatatatatatttttagctggagtctcactgtgttgcctaggctggagtgcagtggcacgatctcagttcactgcaaactccacctcccaggttcaagtgaatctcttgcctcagcctcccacgctcgtctaactttttatattttttggaagagacgggttttcactgttggccaggctggtctcgaactcctgacatcaagtgatccacccgcctcggactcccagagtgctgggattacaggtgtgagccactgagcccggctgattctaatattttgtcaatagtgggcaccatttgcttcttgaatttgaaagcgtgctccaatcacttgaggattttcttaagattcagattctgattcagaaagagagtgaggctctgcatttctgatgagctcctcagtgatgttgatgatgcttttcctgggccacgcattgcccagcggggcctatacaacccttccccttaagtgccttttcttgttgtgggtggatggggagaaacgttgagttctcagaggttaggcagagagccatgctccttccactcttgcccaaggtcgccactggagtgggttttggggtttgcacagctgtgagggtgaagaggctgggtgggggtggggctaggtcacttactctgggtgcagtcacatgcccccagcaaggctttctcatcttgactgtaatctgcaaaggaggagaagggcaatgagaacttccagtcttgttcctgggagagcctacaacatggaggtcccttgactctggttcagatcaccagaggggagactgtgatgtagcctggggcccttgaccactccgtgggaggtctcttggagcccaggagactgtagcctccttccctgctgtgtcccagacccctgctctctagcccttcagtgggcactccagcaatacctggctgggagactgagtctgcttttgtctctgctaataatttgctgtgtcacttagattgtcttagtgcttgacagcacagacttggtatcagcaggcctgtgtttgaattccagctccaccccctaggtccttggccaagttacttaacctttctgtgtctcagtttccctgtctgtaaaatggcaatggtaatatccatgccataaggtctttggttgaaagagaatgtcgcctgcttcaaaagcaacactcaataaatggtagcgatcaccttcctttaggtgtaccaaacaacagcatacctccttatggggtcaggatgagattatcgctataggatctcttccagagggaaaaagatcaatgcatatgttcctcttctctcaggtgtccatgtcaagcctctaatgttccactctggagcctagcctgggatgctttacccagactctctgggagaaagtcagtccccccttgcttgatcccatgaaccttaccagcactgatggtgggaaagtgcctcatgtcttgcagaagtttgctgacaacagggctggaccgggagtagagcccatggcggttaatacccaggtggaactggacccagctggcctcgagtcggagctgcagtggggggtccagggaggtaaggttcatctgctctctgtacatcttgtgtcgcctgaaagagccagatagttgttcattagaggaacaagaatgcaaagacccaccaagataccttgtctgcagttttttattcatcctttcatttattccacaagtgtattaagcatctaatgagggctaggctttaagctgtgcttaggatatcttggggagcaaaacacctgtggggtcctttcttaccctcagagggcttacactctagtgagcaaaacacacacatagttatacaatatcatacacaaatacttaattacaaaccaggacaaatcctgggaaggaaaaaaggcagattgctaagaataaaactagggcctcatataatctgggatctcagggtgagactgtgggcctctttatgcactttctcattaaaactccctatcttacatttcccagtattttatgttccaaagaatcagaagatagaggagtgaaggcaattggtgagaataaaaagaagagagggtgcagatctttaagtggggctggaagctgagttagattataaacgaaaagaagaattaatgagccatttactgtttgttctgcttgggtagccttttctcccaggaaaaaaagagaaaaataaaaaagatggttctaccatttagagatgtagactgtaatttaggagacaagttgtatgtttatgaaataaccagagcaaaatacaaagctgttataaatcaactgctaaacatgtggctcagatggaaaagccttaacattttggagaagggaaaagatgaatctatgatgaagtagcctgaggacaaccacagtgaagaaggcagacttcagctggatcctaaagaacggggcagggagtgggggtggtttggcttgaaggggacagggagggtactcctgcattaaggacaacatgagcactttgagaggtaggcaagaaacggatgtatctggggatgagagaggcaggttgaataaatgcactgttgaatgagaagacggaggcctctgggttggaagggaaggcaaattagtatgatgtcatctggctgggaaaagctgattgggagaggtaggtgggattataggggcagcgttttgcagttcctatatatccctgtttctcaaactgtgatagtataccttgggtctggggtggggtgaaaaacaaaacaaacatggcagatttgggcgtgtccaattttctcattggtggagagttttaaaaattaccactttgggaggctgaggcagatcacctgaggtcaggagtttgagaccatcctggacaacaatgataaagccccgtctctactaaaaatacaaaaattagccaggcatgatggtgcacacctgtaatcccagctacttgagaggctgaggcaggagaatcacttgaacccaggaggtggaggttgcagcaagccgagatcatgccactgcactccagcctgggcgacagagcgagactctgactttaaaaaaaaaaaaattacttttctatcaaaataaaaatagatgtattatggggaaggaaataaaatataccacagggatttgaatccatttgtgatcttagtgattgcaatggactgaatgtttatgtttccttcaaattcatatgttgaaattttaacttccaaggtgatggtattggagatggggcctctggggagtgattaggttatgagggggtagccctcatgaatgggattaatgccttcataaaagagaccccagagaaacccctcaccccttctgccatgtcaggttatagcaagaagacagcatctgtgaaccgggaaaagaggcctcaccagaaatggaatctgccagcgccctggtattggacttcttagcctccagaactgtgagaaatacatttctgttgtttacaagtcacccagtttatagtatcggttacggcaccccaaacagactaaggcagttttgcttcaccatttctctcctatttctgacacccagaattaagtgtaatatccccagacgtgattgcccagtgcagaggagaatacggtaatcaccacccccattcatggcgttttccttgtatgaacgtaacccaagactgaaaatctttgggaaatcatgtcacgtatctctaagaaaacatgattttatggtaagcaggattctaaaactggcctctaagattccatgccctcatttccagaacctgtgactatgaagcactctcactccatgattatgctgcgttgatggcattgttgaatttagggaggttgtcaaggtgggcctgattgaatcgcatgagcccttgaaagtaaagttttttttctggctgttttcagaagtccaaaagatccagggcatcagaagcatttgacacactattgttggctttgaagacccactattgttgggtcaagtggaaggaccagaaagccaccatgaggagctgagaatgcttcccggctgaagccagcaaggaaatgggggcaaggaactgaattctaccaacaacgagaatgagcttgaaggaggacccctgagctgctgacgaaaatgcagccaaccaacaccttgattttaatcttgtgagatcctagcagaaaatgagtcataccatcagatatggtttggatgtttgtcccctccaaatctcatgttgaaatgtagtccccagtgttgaaggtggggcctggtgggaggtaattgtaacataggggtgggtccctcatgaatggcttagcaccgtctccttggtgatgaatgaggtcttgctcagagttcatgtgagatctggatgtttaaaggcatatggcacctccccgctcactctcttgtgctcctgctcttgccaatgtgatgtgcctgttctctaccaccttctgccatgagtaagttttctgaggccctcaccagaagcagcatgcttcctgtacagcctgcagaaccatgagccaattacatctttttttaaaaaataaattacccagcttcaggtatttcttttttccttcccttccttcctccctccctcctttctctttccttccttccttccttctttcgacgaagttttgctcttgttgcctaggctagagtgcaatggcacaatcttggctcactgcaacctctacctcccaggttcaagcgattctcctgcctcagccttctgagtagctgggattacaggtgcatgccaccatgcctggctaattttgtatttttagtagagatggggttttaccatcttggccagggtggtcttgaactcctgacctcaggtgatccgcccgccttgaccacccaaagagctggaattacaggcgtgagccaccacacctcgccagatatttctttatagcaacgcaaaacggcctgaaacattatcccagacttctgacctataggacaaatggggtgttgttctaagtgtctaagtttgtggcaatttgtactcaaaaataaaaaacgaatacgtactttgttcacagaaaggctcaaaagctaaatgctcttattttaagcatatgctttcatttcttttaaaaataaccctaagtaatattttttattagatctagaaaactattcatactctgcaataaaacttttattttccctcaaaagccatgccatagtattgccttctatttgtgttggacagtgaggccattgcctggtaacactggccttccttttaaggaaagagaaaaagtatatatcacaaaaataaagcacaaagtcttcatggctgttgctttcatcaacaaaaataaaaccttagttacaaatcacatgatcttcaggggagaagtagaaatcactttgctcctgactctgcaatactggaattttccttggaaatagtttcctaaaaagaagagtatttctttcagaaaaaaagagcattttaaaacgtttgattttacttattttttaagtagcaaatgcatttacatggctcaaaatgttaaatgtcaagactcttccatcctgtccctgagttaacccgcttcccatctccagaggcaactaatgttgctggtgtttttccccattgtttttttccacttttatttttataggtatgataatataaaatccgcactgttctgaaacttgctttattttcctgtcaataggttctggtgatttttccaattcagtacacagaaagctcctcattctttgttaagttcatcacatcatattccagtgtatgaaaatcacatcattaacctgctatggtctgaatgtttgtgttacccctaaattcatatgttgaaacctaatccccagtatgatagtattaggaagtggggcctttgggaggtgattgggccatgagggcagagccctcatgggtgggattagtgcccttctaaaaaatatcctgtatttttagtagagacgggtttcaccatgttggccagatggtctcaatctcttgacctcatgatccacccgcctcggcctgccaaagtgctggggttatggtgacatgcacctgcagtcccagctacttggaaggctgaggcaggagaatcgcttgaacctgggaggtggaggttgcagtgagctgagatcacgccactgcactctggcctggcgacagagcgaaactccatctcaaaaaaaaaaaaaaaaagagatttcggaatgctatctcatctctcccactatgtgaagagagaaggcttcatctatgaaccggaaagcaggtcctcacactagacactgaatctgctggtggcttaatcttggacttcccagcctctagtactgcaagaaataaatttcttttgtttataagccaatcagtttatgttactttgttatagcagtctgaatagatgaagacatcatctacttgcaaacttctaggttgtttgtaatgttttgttatgccgagcgatgctgggacattctacctataaatatgacgttctgcatgtgtgagagtgtatcggtatgataaattcttataagtgttgttgatgggtcagagggtaggtgcatttataattgttactgatattgccaaagtaccctctgccaaggcaagatactgctaatccctctccctcagcattgtatgagactatattcaagaagctttgccaacagtgtagtgacacttcttgatccttgtcaatctaataggtgaaaaatggtatcacagtgcattttgagtttgcatctctatcttgttatgagggaagcagaacatcttttcctctgttcaagagtcatttgcattacatttgcctatgtttgtattgagttgttagtctttttcctattgagtttatacactcagaaaattacattttttctcatatgatttgcatttttctcccagtttgttgtcaatcttttgacttcacttatggtgattttttaaaatgcagaaatgttgattttttataaggttgaaatgaccaacccacttattcatggctccaacttgtgtgaaattcttaggccagtctcacgttgaaattacaagaataagaaaccaaaccaaagcatggtttcctctagtattttgtggtttcatttttttccatttaaatatctgagaggtctagaatttatttagataaaatgtgttaggtatgggttcacctttcttccgccctccaggatgactagctagttctttaacaatcatttattaaacaaattcattttttagttcactgatttgaaatgtcatctttgtcagacaaaacatttccatttgtatttgggtctatttctggaagctccattctgtttcatgctctgtctggccatattccaaggcaatgctgttgaacttttttaacttgataaaacactttaacagctggtggggctagtctttttgattgctcttttttttttttttttttttaaagagttttcctatatagtccaacttgtatacttatccacatgaattttacaattatataaacgctttcaaaatggaaaccttaaaaagttttaaacaggcttatcaagtaaccttattataatgtcttcttgaattattgatgagcgtgtagttggcacatcgttctagagggtaacttcccagtacatttctttctttcttttttctttctttctgttttattttttgagacagagtctccctctgtcacccaggctggagtgcagtggtatgatcttggctcactgcaacccctgcctcccagattcaagcaattctcctgcctcagcctcccgagtagctgggatttacaggcgcatgccaccacacctggctaagttttgttttttcagtagagacggggtttcgccatgttggccaggatggtcttgaactcctcatctcaggtgatccacccgccttggcctctcaaaatgctgggattacaggcataagccaccacgcccggcccccagtacctttcaaaacgtgtaatgagtgtaccctttgacttagcaatttcacttctgcaacttatcctgtagaatgatttgcacaactgtgcaagaaaatatgttcaaagatgttcattattgtttgtaactgtaaaaactggagaaaagagaaatatctaggacaggggtatttaagagatatctctatatgtagtgacgtagaaggatgtctaatttcagaacagtgtagagtgggtctttttctttttgctaaaaatatcatatacaggtgcttatatagacatagacactttcatttagtgtgcatgaaaagagcacataccaaactcaatgatggtgctccttgggggtatgcatgagtagcttcatttttactttatatatttctgtaattgtacaattaaacaaattacactgcaagttgtttttgcatacctctttctcattcctccatgtgtctccccatctagcatccttttccatccccccccctttttattttaagcattgcatcttctcatttgaattgcatttcccagacctggcaaaaaaaatatttcctcttgtacttgcatgatctgtgacccacaatttcagatcacaatgccccatctccttgagtccctgtggttaattcaggcatgtgcaaatgacccaagctgtgtcaatctgaggattcttaaagatttttcaaaggctagcagagaagagctgttttcattttctgggattctcagctatgagaagactgtacatgaagagctgccaatgaccagaaagcctgcctggtattgccaccactgaggaaaactgaacagtgaagtaagcaacagagggcaagaggttgctcaaaggcatcgtttgagtgcctggatgcagccatcatacttggacttagttatctgaacggaatggatccctttcctccagctggttaggactaagtttttaagctgccctttgaaacatgcaaacagccgggcgcagtggctcacacctggaatcccagcactttgggaggctgaggcgggcagatcacctgagatcaggagttcaagaccagcctagccaacatggtgaaatcctgtctctactaaaaatacaaaaattagccgggtgtggtggcaggcgcctgtaatcccagctacttgggaggctgaggcaggagaattgcttgaactcgggaggcgggggttgtagtgagctgagatcgtgacactgcactccagccgaggcaacaagagtgagactccgtctcaaaaaaaaaaaaaaaagaaagatgcaaaccccttcctgatgtgccatgcacttgcactggctctgggagatggtgtcagcttccacttttcacagcccacaccctggaaggacagaatctcgtctgccccatgatgtccatgcaagactctgaaatttgttccccatgtccgcagtttttaggggcttttttttttcttaaacaaacaaaaccacttccctaagatgatcttataggtgggtcaacatgataggcatctttctcaataaccttcatcatcacgcagtgcccttgtttcatctccagactaatttagagttactgttgttgttttaacctctttaaatctccctaaatctttctcttgagatggttccaagatgtcagtccacttcaatatcagtcttcacctacagaagcccttcaaggaccacctcagatgtctccatctctagcattaacctttctttgactgtcccaaataaaggataaacagcacaaaggccaaacacagggctctgttttggtgtcactggttggtgacaatgatgacaatgccatagttcgacccctgctgtaatgaagtgagagggtcacagaatgcacagcaagtcgaacaagaactaatcggtagtgcagtaacagaaagggatgcagagtctgtgtcacaaggacctggttctgcctcttaccagtggagcatcaaaaatcaatgctagtgtcgttgctatgaacacgatgtctcatgtgatcctgcagcccccccacgagatacatattcctatccacagtttgcaaatgagaagactgaagatagggtacaggcttaaaaagtagtttaagccctctgagcttcagtttacctgttgtgggaaatggggaatgctgatactacctcctataccatcagaattaagtgcagtaatattcaaccatagagcaggcatccaagaatggtggctatttttaatcatgatttttaccacttataaagatgagagaccaggtggatgatgatttttttcaaaaacactgttctactggctaaccagaaacaaccagctttgcaagccactgcaaaatcccttggaacatcccataagcaagggaatggcatgtatgtcatacttgcattagacaccaccacaatttgcatgccttggcatgtgtgtgagactgcagatcatccaagggaccttggaatcctgctgtagcttttctgtggtctcttggtgtgcagactaagcaataggcaggttatcaaggcattagagggagaaccaaggcaggtctgggcttgggccttaggaggtgggtgtctgcaggcatggggatggcaggaagcctggaaatggagcttcggtggcctaaacgggagcctggagtcccatttgcttcctgggatatgggagctgagggcgtgaggagggtgccaatctgcaccctgttttcttctgggaccctgagggcagagccactggggtgctgcgagtgctccagacagggaggggagacggctgtgactcacagggttcagggaggatttggaaggttctcagaagactgggcggctccccatgctcctagtcactaaccacacggcttcaggtctgaaaatcttccccagtgcctaaatttccttgttttgaggaaatagaaggaataggtttggatcccccgcctccaaaggttttagagcaaaggtttatggctgctatattcaacagttctttggggattgaggtcccctttggagtaattttgatacctgaccatgcaaatatagacacagcaatcctctccaatgggtgttacagtggagaagtggggcagtatcagaaggggaagctgagacccccatttgttcccctccaaaactatatagctagctgttcattcctaaggtctcccagctaaaaagcacagacatctttggttcctgcctcttcccaatcatttctaaatcctggagtttaacctccattacctccttttttttttttttttttttttttttttttttttttttgagatggagtcttgctctgtcacccaggctggagtgcagtggcccggtcttggttcactgcaacctccgcttcctgggttcaggcaattctcctgcattagcctcccaagtagctgggattacaggtgtgtgccaccaagcatagctaacttttgtatttttagtagagatggggtttcaccacgttggtcaggctggttttgaactcctgacctcaggtgatctgcctgcctctgcctcccaaagtgctgggattacaggcatgagccatcatgcccagccatccattacctcttaattttcccctttttttctgttgcctgtgccttaaccctcttatctggatcctggaatagtctctttactgatattcacgacctcagtcttcttcccttctccactccaggcctccatcactgccaaattcactgtccagggcacagctgcaagcacttatttccctcctatgaaatccttcaataggtccttgttgtccgtggactctcatccaaattcctactttagcatttccccaagtgttttacttctttaaatcttcctccccacccattgccctcctacctaagttctatgtttagtgttcctgtactttcctcccacctcatgctgttccatcaccttggaatgccttcttctacactttcatctccagaaattcctcccagccaaactcccatggaacttcctccttgaatcttttccagtcctacaaccaaccagatgtgagctttctttctcactcccccaaattttcataaaactccaatttcttttattgttcttgccatattttgagtaatagtgatttaggcatatttctcatttcttctaactgagggtgggcagaggcaatgtcttactcaactttgtgcctcgtccaaaacttagcacagcaccttgtgcacagaaggtacttaacactaattatggaaagaagttggaagctctccactagtactgacatatgcagctactatggcctgagtatatttttggtattagtgggttacaaaatattttaggggtttgatggtttataatccaagacaaatatggtctttttcagagtatttcgctccaagttgtgtacaaagaaaactttctaaataaaggaactccccaggagttaggcaatgctacagcagggtcaaagagggaaaacagcaaaagcgttagtcaggattagacacttctctatgagtttgaacatcactgggtagttcagagctaagggtttgcataggtatacaatgtatctctctgtttttagttgcattgggacaaactaactccaaaataatttaattcaaaatcattttgattgcactggagaaaacacatttcttttgatgggtagttttaaatgctgactctccaggagaaaataaaagctttcagtgtcttcagatatgaaaataaacggtcaacatgaaagatgttattctgatctttcaaaatttaaggaacttccttggatttacttctgcatcttcggtcacttagtccgtgtctccttttcagtctaccttggtctgtcattaaatacaacaattctgaaagcttctgttctggcttttttctttctccctctagccttgctttggatgtgattgcatccaccgccctagcttcaatgatcacttgtgtgcaaaggactcataaattttttcttccagctctctcagcagtagactcataaattccactgctcatatctgtaaaggacaagatagcaaatattttagccttggtggaccctatggtctctgtctcaactgcccaaacctgctgttattgcacgaaaggggccttaggcaatctgtaaacgaacaggcaaagctgtgttctaatgctgctttttttgtttgtttttacaaaatcaagtggtcatgggccagattttgtctgcaggccacagtttgccaacccctgccttaaaaacatctacattcaacatgtttaaaactaaactcttgattgtctctctaagcctgggcctcagttgtggcttctgttctgcccagtgaaggccacctgtcataggtcaggttctccctgaagctggccctgggctttgggtttaggagcaggtgattcattatgaaggtgctccctggagaaaccagtaagaaagtgaggacaggggaggaagaagccagacaaagaagtcctagtcttggtctaatcctttggggagctgttaggcttggtatacctgaaagtttgtcctgcattgaagcaaaggagctgagcctttgtactctgatatggtttggttctgtgtccccacccaaatctcatctcgaattgtaatccccacgtgtcaacgaagggaccaggtcaaggtgactggatcacgggggtggtttcccacatgctgttctcatgatagtgagtgagttctcaagagagctgatggttttagtgtggcacttccttgttcttgcactcgctccctcctgccaccttgtgaagaaggtacctgcttctccttcacctcccgccatgattataagtttcctgaggctcccccgccatgcggaactgtgagtcagttaaacctcttttcttctacattactcagccttgggtatttctttatagctgtgcaaaaacggactaatacatactcttactctggtcagtcattggctatgactgttcttggggaaagagagaatagggggagtgtctgagtttactaaggctgccataacacatgacctcaaacttgatcatttaaaataaaagaaacggctgggcgcagtggctcacgcctgtaatcccagtactttgggaggccgaggcaggcggatcacgaggtcaggagatcaagaccatcctggctaacacggtgaaaccccgtctctactaaaaatacaaaaattagctaggcgtggtggtgggcgcctgtagtcccagctactcgggaggctgaggcaggagaatgacatgaacccgggaggtggagcttgcagtgagcggagatcgcgtcactgcactccagcctgggtgacagagcgagactccatctctaaaataaataaataaataaataaataaaaattttaaaaataaataaaagaaacttactgtgtcatacttcaggaggccagaagtgcacaatcaaggtattttcaagactttatgctttctggagactctaggggagtttcactctctaggggagaatccattgcttgtttctcttagcttatggtggttccaggcatccctggtcttgtggccacatcatgctaatctctgcctctgtggttaccttgtttcttcctcttctcttaattctttcctctcctataaggattcttgtgcaagcattgagatacccagataatccaggtttatctcttcatctcaagattcttaacttaatcatatgggcaaaggccctttttccatataaggtaacattcaaaggttccagggatttgacgtggatatattttgggtaggggtgggagcaggggtggggagtttctaacagaataaaattcctaggcactgcccgatctttctaagggtgaggtaagtgtcttagccactagccacaaagcatacagaagctccctccttttcagtctaccttggtccatcattaaacactacaattctgaaagcttctgttctggctctttttctttctccctctagccttgctttggatgagattgcatccacaccccccagcttcaatgatcgcttttgtgcaaaggactcataaattccaggagttatcctggagtcagaattccaggagttatccttgaaatttctctctcccttcccaaaatgtcccctgcatcaccgaattgtgtagatgttacctcctttaacagctcctgaatctgtccacccctcttctctaccaccatcaccctagcctgtcacctggacttttccaatagcctcctaactggaagttccactgggactctctttgatcagcactcctaactgtaaccagaatgattgctttttcaaaatgcaaatctaaacctttagcttcctgctcagaagcactcaatgtctctttattgatgttaaatgaaaacaagcttccttaggcctgcactggccaatatgcaatagctactagccacatgtgactaattacatttaaactaataaaaattaaagtcacaccagccacacccaccacattttaattgctaagtagccacatgtaactagtggctacccttttgcacagcacagatgataaaacattttcatcattgtgaaaagttctattggactcagtggtctaggttcatgttcttctatcccagctacaaaggcaatgatctatccaccatgggtgcttggaacagccatatccttggcctggggcacactttcctcatctttgcctcctcgtttgtctcatttgtctaccagctcaggccttcattccttggaagtctgcattggcctccggagaggtcccatgtctctgtttctgtgttgcgttgcacagtgtctctctcctttatccatgctgcacttacagtttcacatttgcttgtgttcatccaccccagacaccacaaaggtagagtctatttctgtttctgcttaacccttgaatccttagcatcctgagcacataacagatgttcaataaatatatatatatttttgagactgagtcttgctttgtcgcccaggctggagtgcagtggcatgatctcagctcactgcaaccaccacctcccaggttcaggtgattctcctgcctcagcctcctgagtagctgggattatgggcacctgccaccacacctggctaatttttgtatttttagtagagacagggtttcaccatttgtcaggctggtcttgaactcctgacctcaagagacctgcctgcctcagcctcccaaagtgctgggatcacaggtgtgagccactacacctggccaacagatgctcaataaatatttgttgaatgaattaatgtgctccttatctcacacctagtggatgatagcttcaggagaacgactttctgtatttttctggaaagacagctaatgggaaccataagcttactcaagcccagtataggagaagttgatttgcatgctctctggataggatatgtttgctataatgttaaaatttccagaaatcctgcctcccattcttccttctttccaactttgtcacatcttaaatttcctggggctttcctgagttaggatgaaccgaaatgataatgagaaataacttctgtcctttctgctgaaataactagtctccctttggcatctggccacacattctcctccaaaagtagtgatgccaagtcctctcaagtatagctatttaaattgcatgccacagaatttatattttgctaaattcactggttactaagctattatgagaaatggcactctttctgttttgagagctcatactgaggtctcctggggaggaatttggtgataatccattaagtattttctaattatttgaacccctgtacatttcctggagctgttcattccagagcaattctaggaggcactgtgtcagatggagaggtatgatggggtccgcccagtcccatcacctgggttaggatggttgacctgcagaggttcatgaagctctggtcatcagtgcctgggatcccaaatagtgagaggaaaatgagaaaggggctgtcagcactcaggaaaaatctcttcgttggaaactgaatttactgctcattgtgctataccatcagaagagaaatggaacagcaatgaaagagctggagccatgtgctttcttcccagttaaactctaagtttcctgagggcaaggatctaccctggatttcttttgcatcctcctcagtatttgaaggagcactcaggagtgctatgcacacagtaaatattctataaataaccgattattagatgcttgaacacgtttcctgctgccaaagctccatcatactccaaaacactagtatcaaaacttgaggaagaaaatcccttggacacaggaattgcacttgaattctatccatggagttcataaggttggtctcactcatttaatacatttccaagagcactctgtcacacagacaattagaaaagcattatagtgaacttctatagcactcggcttttaaattaaatcttgcatctgtttgatccatatgtctctttcagtgttcttatccttgacgtgggtcctagaaagaacattttctcaaggttgtttttcttttttttccccatggctgtgatgaatttggaagaatcctccttcatactgttctatttctcctgtgacacggaaggattcaggttttgtgagacctgaagctaatacaatttggaggaccatctttaagcaaaagagtacaaaattacgaatacaaaaccaggtatgagagtaaaggtttatttagaatgaaaaagaatcaataaattactggtgacttgaaggcttttttctgagatatcaaacttatgtagaaatatatatatgtgtgtgtgtgtatatatatgtgtgtgtatatacatacatacatatatatattatatatatatatatatatatatatatatatatatgtagcagggaatataggtgcattccactacaactggctattatttttatttttatttctttgtagagacagggtttttccatgttgcccaggctggtcttggactcctgggctcaagccattcacctgccttgacttcccaaagtactgggattacaggtgtaagccacagtgcccagctgtatgtagaaatatttcttgatcataacctggctcccttctcaactccacagcattcagcacccacaggggaagtgaggggaagtgggctgaggcttcatcagcttcatggtaaatctgcctctgacaggcaattgtgcaattcacaatccaggcgtatttgttgagcactttcagagacattaagtctgggtccttatccaatggactttcttgattcttctaaccagtttctgagtatgagaccatcagagcagtaacactgagtagtagtaactgggccaagaagggcatgggcttttggaaatggctttttggtgttcactgttggaatgggcttcatttctgaaacctcagcactgcgtttgtgccggctgcctgtgttcatgatagaattatgcagaacgatcaactctccccaaaatgcatcttcagcagaacgagctgactcatcatcagaattctatgggttgtcataagcaggctgaagaattgtttctgttttctttttaattttatttatttatttatttatttttgttttaagaattgttgactgacttcttcccaccgctccatctcatgggctcaaaaaacatatttctcattgcttccctttctgttcatctgcctcctcgcccatttatctctgtgtcctagaggccaagggaagtccaaacaaagctctgaggcaatgtgagtgggccggagctgcagtgatctgctagaccccaaagtgagctcccaattccttctcatgtcacctccccaaagagaaatgcacccccgctttggaggctgtccttccagccctgaaagattatctgcttcagctagctcatgaatcaaagcttgattttaaggagcaggtgataggtggtaaatgctgctgtatctgtaaatcagagtcaccattagtgatgggtttgtgaatctagaaaggggaaagggtgggagaggcagatccctcatcccgagtcctggctctgccactcacagctgtgtgacctagggcaagttatctaacctctctgcgcctcacctcatgtgaaaagtcaggataataaatgtacccaccttatagaattttagtgaggattaaatgaattaaagtttatgtttcttagcctgttttttgttgctttataacaaaatacttgaaactgggcaatttataagaaataacacttctccctttccctttctttcctttctctttctttctttctttctttcttctttctttctctttctttctttcctttctttctctctctttctcttttccttctttccttccttccttcctttctttcctttctttccctctctttctcttttccttctttccttcctttctttcctttctttctctctcttttcttccttccttccctccctccttccctcctttctttcttcctttcttcctttcttttctttctttcttttctctttttttttctttcaacagagttaagctcttgtcgcccaagctggagtgcagtggtgtgatcttggctcactgcaacctctgcctcctgggttgaagtgattcagcctcccaagtagctgggaatacaggtgccagccaccatgcccagcccagctaatttttttggtatttttagtagacacagagtttcaccatgttggccaggctggtcttgaacttctgacctcaggtgatccgcctgcctcagcctcccaaagtgctaggattacaggtgtgagccaccacacctgaccacatttatttcttacagttttagaggctgggaagtccaaggttgaggggcatatctgatgagacccttcttggtggtgggaactctctctagagttcttttttttgagacagggtctcactctgtcactcaggctgtactgcagtggagctatcatggctcattgcagcctcaaccttctaggcccaagtgatcctcccacctcagcctcccaagtaactgggaccacaggcgtgtgccaccatgcccggctaattttgtttatttttatagagacaggatctccctatgttgcccaggctggtctcaaactcctaggcctaagcgatcctctgcagagttctgaggtggtgcagggcatcacatggcgagggggctgagtgtgctagctccggtttcctttcctcttcttatagcaccatgagacccactcccacgataacccgttaatctgttaatccatggatccataaatgagttaatccattcatgacagtagagccctcataactcaatcacctcttaaggaccccacttctcaacattgccacattggagattaagttttaacatgaattttggagaagacaagcattcaaaccgtaacatcatgtgagttattgttactgtgacttctgggactcagtactggtaactttatcctttacaaaggggaaggaatactgtgaagaattatttccaacttctgcttaatttcccagttacctgagttctgcttaccaaggtgaagtcaagagctctatttggcattccctaggatggtccctggggtaggctgaataatggtgcccccaaagagatctgcgtcttaatctctgggcttgtacataccctatgtgtccagatgggctggcagatatgattaaagtaagaatcttgagatggagagatgatcctgggttatttgggtgggccctacatgtaattacaagaacccttataaaacagacacatagacaagaagacagagaaaagaggatgaggcaatgtgaccacagaggcagagactggcatgaggtggccactagtcgataggtacaactattatgtatcaatatttttttaaaaaagaaattcctggagtcaccagaagctgaaagagataagaaatggattctcgcctagagcctcaggaggggacacagccttgcatacatcttgagcttggacttctggcctccagaaatgtaagacaataaatttatgttgttttaggccagtcagtttgtaataatgtgttctggtggcttttacaaatatacaagcaggccaggcacagtggctcatgcctgtaatcttagcactttgagagtccaaggcaggaggattgcctgaggccaagagttcaagaccaacctggccaacacaggttcactttactttacatatatatatatattttatatatatatgtcttcactttatatatattatatattttatatattatatattttatatattatatataatatattttatatattatatattatagatattagatattatatattttatatattatataatatatattttatatattatataatatatattttatatattatataatatattctatattttatacattatatataatatattctatattatatataaaatataatatagaatattatattttatatatattttatatttatatattatatttttatattttatattatatatattatatattatatattttatattttatatattatatattttatatattatatatattttatattttatatattgtatattttatattatacacacacacacacacacacacacacacacacacacacacacacataatcagccattggcagttacagctgccaccgggcagggcgtgatgtttaggcactgctgtttctgagaaccaagtccaaagggcgccccctaagaatggcctttcccttgcccaggagctaaccctggggaagtggatggtgttaggctggagagaggttcttgcttcttcatctcatcccgaattctgaaacttggctgcatgctgagccctttaaatgggtctggccagccaatggaacaagctcccataagagtacaaaagcccagtgctcagccagctccaaattcgtagtgccatggtcctctctggctctctagaccctgcccccatacctgcctcaagcactctttgcttcaatcccccacacctcacatgtaataattgtcaccatttctggagccatggctctctgccagcaccttttatgaagacttcacatgtgctggctcatgactcttcacaacagccccataagacaggtccattgttagcccattttatagatgaggagactgacttgagctagctcaaggtcacctgcctggtgagtggcaggcacagtgcagtgatttggacctggccgactggcttcctaggccaagctcttcatcatgaccctacgtgctgactgcatcatggtccatctggcacctcctggctcctcatgctgcagccctgagcccaaggctcccttctgactgtcccagcctcctccccagggagagagacctgtaagtccataaatgctgtgagggtgctcagtctgggcagggagatcctcgctgtagacacctttcagacacttagtggtgggtactacagaaaacgttagttacatgtagttggggacctagggacaaaacgacttgcttaactgatgagcaaatctgagaaaaaattaggaatcaaaatatgattgttttaaatggttttatcaaagtggctagacttgccctgttgattttgctcagccctgttcattttgaatagcctaacagctctgagtcaaaatggccccaggctgagctagttgcctagggcaggccaggagggacattctaggagctgggactctgtctatagtaaaaagtctgcttatctaccctcacaacaactttcagacaccctggagaagaatgaaagaatgatccctcatctaagagtccccagagtccagtcagggaactagcagatgccttctatccgggccaagtttcccagattcttgttttggctatagagctaagatccaaaacatctagctccacacaaataaacttagaaagagctgccaacggtgaccactctgaggggagtgaccatgtgcagaaagacagtcaaggcttgcagaagtcctgccatgacggctcctgctcagaggacatctcttaaaccatttccttacgtagcacacaccaattcccctctattctgcatggtacatgacacattttgggaaacatgaaatattaaagctggactgcggagctcctcaacctaattgtgatgtgatgattcacgcagcacaggggccttgcagctgcagaatctccctttctgcagaactgttgcctccctgctgtagaccagtggttcgccactgggggcgattttacccctcaggggacatttggcaatgtttggagacatatttggttgtcatagttggtggggagagtgctgagggctgttgtaaacattctccaatgcaaaggacagctctgcacaagagaaaatgatctggccccaaatgtcagtaatgctgagttagaaatcctgggctagagccatagaataatgagcaaataaagcacttaatcctctgatgatggcctgaaaattgctctgatggattttgcactcggtgtaatttaatattttccatagacgcgtaaaagccttcctcagagcctctccactccttctatagcttctgcacagccaaaaattaaaaatgttacttaattgtttaaaaaaagaaaaccaatttgagtcagcaagcatttagttgtcagacttctaccaacctaacaagcatattgataaaacactaacacacgtgttagttgcaaaagatgcaatattgatttatttaaatgtcatcattgtggtgcttttcaatcttccaactgtgtaatcctaaaataaataaatatatatttcacacaccacacacacacacacacacgcacactattagcaagtgacattggatagacaggtgtcctctctttcctctaccattttcctgaatgcaaaaagaagaaacgtggtgtaaaggcaatactctgagagaaccaagacaaagcaggagctttaaaaatccaccccctgggtcctctaataatcaaaggtttaccagaatatatttattttcaaaagtgtctgaattctgccttactgcctatcatacaggcatgggcatttgaaagagagatggatttgaatgttggggaatctgcatgtaggtgggtacaatacggggttaggctggggcacatattttcatggttcataagcaaatttccttgtggctcactcagattaaattctttcaagtccttggcctgtgagctagtgctaatttgcgtggtattatttttccacctgatttgcaaaccaagagaatgatagcaaatgttggcctcctttcctcctcagcatgaccagtcacccatgtggtaggataatttattgagatattaatgtgttttttgttcttccggaattttacccacccctgttctcagaagatagctgggcctttgtgttccttgcctcagagtgtttttaggatccaggaccaaggggaagtttagacaggtagccaggcttctctcactccttccttggatttttaaaaatgtctaggctcggccaggtgcagtggctcatgcctgtaatcccagcactttgggaggccgaggcaggcggatcacaaggtcaagagatcgagaccatcctggtgaacatggtgaaaccctgtctctactaaaaataccaaaaaaaaaaaaaaaaaaaaaaaaaaaaattagctgggcgtggtggcaggtgcctgtagtcccagctattcaggaggctgaggtagaagaattgtttgaacccgggaggcagaggttgcaatgagcagagatcgcgccactgcactccagcctggtgacagagcgagactctgtttcaaaaaaaaaaaaaaaacatgtctaggctcagtgaaggcatttgctaggcagggggatttaacagagaatgtgaaagtgcataaagaagcacagaattttggggaagcatgaagagactccaaggttaggaaaggagagttgactggggtctgtgtctggcctgtttcttggaggtgatccaatgtgctggggaacggttaggtgtgtgcagagaaagactcattttaggcaccagaaaccgagtctcagccaataatcctgtgcttgaacttgatgcagaaccaacagtgccacccacctgcacgagaccaggtgatggaacatggactatgggtcctcctcaaatgtgctcccagacaccctaaggacattgacccaacatgaggggcttggggtaaggagctccagtgatgactcagactaaatttctagccaaccaaacagaaaagagggcctagagtccaaagtgattggacttttgaaaaataaaccaatgctatgttactttgatttttgagtttgtagagcaaaatccatctgaattcatttacctattgagtgagagtagggtaggttctgttagagcaacagcttaatcctgaaatcggagtggcttttcaaaacaagagcttatttctcactcatgctacttgtctcgtgaaggtcagtagggattctgctccacacactgactcagggacccagcttgatgaacacaccaagatcccaacaaatggtcttcacagtcatcagggcaagaaaagagaggaactggaagatgaagtgctggctcttcaatgctttgggaagcgacgcagatcacatcaactgataacccattgtccaggactagtcacatgaccccaactaactgctgggggctggaacacacgggagaacaagtggactttggtgagcagaaaatgcctctgccacagcctcttggtacttattgaacataggatgtgtcttttgatttaatactattaatagtttgcatttgcataaatctcattataaaggcattttaggttatttccatttattgtcttattctcctctcctcaagctcttaaagaaactaaggtccacaaagtggaagtaacaacataataagtggaaaggaggaataaaagccagggttgtgacctgagctttttctgctcttccacagtggctgcagagaaacgaatgctttgtcaagaatttaatttgaatttccttggagccttcttaaagatcatggtggtggtgggtggggggagacacagaacctgattaactttttgctgttgagaaagcaatgactgtaccaagattttactgagatttttgcgaaatgggctggtttcccgaaatgggctggtttcccgacaaaaactcattcctttctcgttaaaatacaattgcttcctcttctgggagctggttttatgctatgttgcaatgcacctcttgtttccactccagctaactgtgtccttaaccttatcctgacctcatagaaccacagccctggctcagcacttaagtaaaacccgcccagagaggggcatggggcttctgagctggagtggccccgaactggaagggacttgaatgagaaggggcatatcatggattgtcccagggtggaaaccacctggacttctgccttggtgagcaaaaatcagactcaagaggaaccagtgtcccaaaatgggcctacagtgtgaatgaggaaaatagctaactacctcttatgtggcactcacatggggccaggcagttttaagcactttgctcttttaactcatttcacccccacagaaactcctcataaggtcagtattattattattaccaccattgtaaacatatgggaaccagatataggcagcaaaaatgacacctccaaggtggcactgctagtacaaggcagcgttgcgatgacacccgagtatgacatctgaatatgtgtaagatactccaccaataatgatttttccccctgattaggaagaccaaaaaacttttgtataaaaataaaaaactatggtgcataaggagggatgagttggataacttttaaaacgtctgatgcttattgccaacttgccctccagaaagagaaagcaacctatacttccagagcagggtactgggagtaattctgcctcgataatctctgggccctgatgcaaaggggtgtactgtgacagcatggctcactaagcctcctggacacaaatctcttctcaaattggtttccaggactcaggctcagacatgaaataaagttaaactcagtgttgagtttcggctctggagttgaaaaggtatctccgaaatgcagtttttctttctttctttctttctttctttctttctttctttctttctttctttctttctttctttctttctttctttttctcttttctttctttcttttctttttttcttttctttctttcctttctttctttctttctttttctttctttcttctttctctttctctcctttctttctctttctttcttttcttttctttctttctttcctctctctctctttcttttttcctttttttttttttgacagagtctcactctgttgcccaggctggagttcagtggtgtgatctctgctcactgcagcctccgcctcccgggtttaagcgattgtcttgcctcagcctcctgagtagctgggactacaggtgtgcaccaccatgcccggctaatttttgtatttttagtagagacagggtttcaccatgttggccaggatggtctcgatctcctggcctcgtgatctgcctgctttggcctcccaaagtgctgggattacaggtgggagccactgtgcccagccaaaatccagtttcttgtgtaacatactctgtctgagccactttcttcatctgaaaatgaggataaggactgtacctgcttatggggttgttgcagggagtaaatgtgtggtgggtgaagtggtcagcactgtgcttaacatagagtaagtgctgcacaagtgtcacctgccatcaaagtgtcaccgactcaccagaggcacggtttgaagggaaggtctccagggagcagagattagcctgtttaaccagtttaataaatgctttagtaaaagaaaaagagttgttcctagaatcagcagaattcctgtcacttcaaggaaagtcattgagaaacatgggctcagcagtttgcactgagaagggtatgtgcatgtaggaggggaaggggggcagagtttccaaaataagtagattgattgcgttctgtgttttctccccatttgcaagcattaggtaattgacgtcgaagtgatggaggagagatcaatatgtgtgttttctctctcgctagaagcatgagaggcagctaagtcaagtgagggcgatggctgggctggaagcactggtgcctttccctgacaacaggaggccacaaaagccatttcatcatcatcatccacccaaacatcaaacataaatggataaggctgcatatcgataagtatcaaataacctgtaaggaatattaaagcataatcaactagcagtggtcctttatctgcttgaggatcagtgctgtaggaaaccaggcaccctgctcagtgtgttctgtacatgatctgactccatcttcccagccacctcttggggtccagattacatcccactttatagaccaggaaactgaggcttggaggaaatgagccttggccctgcatagcgcttatgtggaagagccaggattaatttttttttttttttttttttttttttttgagacagagtctcgctctgtagcccaggctggatggagtgtagtggcatgatctaggctcactgcaacctccgtctcccaggttctggttcaagcaattctcctaccttagcctcccgagtagctgggattacaggcacacaccaccaggcccagctgattttttttttttgtatttttagtagagacagggtttcaccatgttggccaggctggtcttgaactcctgacctcgtgatctgcccacctcggcctccgaaagtgctgagattagtgccaggatttaaacccagagttgcctgactgccaagtttctcttaaccattcatttaccaaatatttgttgagtgcctactatatacaaacagcattttagatacctgggttacaatgatgaagacacaaagaagcctccatctttctattagttttctgttggggccctaacaaactaccacaaacttagtggcgtaaataacaaaaaattccttctctcagttctggagtctgagagtttgaaatcaaggtagcaataggactgtgctccttctggggactctaggagaaagccccttctttgctgtttctgtcttctggtggctattggtgttcctcaacctgtgaccacctcactctactctcggcctttgtggtcacgttgtcttctcctcttccgtctgtgtctaatctccttctgcattcctcatataaggacacttgacatggaacttaggggtcactggataagtcagaatgatctcctcatctcaagagtcttaattatatctgtaaagacctgttttttttaaccacataagatgatagttggctggttgcggtggctcatgcctgtaattgcagcactttgggaggccaaggcgggcagatcatgaggtcaggagatcgagacacagtgaaaccctgtctctactaaaaacagaaaaagttagccgggcgtggtggtgggtgcctgtagtcccagctacttgggaggctgaggcaggagaatggcgtgaaccaggaggtggagatcgtgccaccgcacaccagcctgggtgacagagtgagactccatctcaaaaaaaagatgatagtcacaggttctggggattagaacatgaatatcatttggggagccattattcggcctacctcaagggccatcctagggaatgcaaaatagagccaccactcaaaccaattcaacccttgaagagtttaagatctggctgggtgtggtggctcacgcctgtattctcagcactttgggaggacgaggcaggtggatcacttgaggccaggagtttgagactagcgtgaccaacacggtgaaaccctgcctctactaaaaatacaaaaattagccaggtgtggtggcacacgcctgtaatcccagctacttgggaggctgaggcaggagaatcacttgaatccaggaggtggaggttgcagtgagctgagatggtgccactgtattccagcctgggtggcagagtgagactccatctcaaaaacaaaacaaaacaaaacaaaacaaaacaaaaaaaacccaaacacaaaaagcttaagatctaatgaggctatacactaagcaaatcaatacacaaaaaggcattaagtggtgttaagagcccagctgaaaataaaacagggcttggtaaggacaacatctgggacccctgtgggtcagcaggacaggaaagttctctctgagtgggcagttttgaaagtagacgcaaaggacaagaagcagcctgctgatcatcttcacatcttcagtagagcctgaccattctggttcatcagcttaatttatgccttaatgagtaaataatacttctggatgagttgggcatagcatctcctgccaggagagggaggaagaagcattttcttatatgcaaataaaatggctttaatatcataaactgcaagcagccttaacagaccactgtcttcacaactgccaaaaagagctgctgcggaccaactgctataaatcctagctcatcatatttggctgacttcccctgccttttaatgattttatagctaataacagaacagaatgtcgtctcattcagttacttggggtgtacattttgcagtgagttaaacccagagaggccactggtgagttacgctgataaagttaggcattcaatggttgctttattgatgttttttaatacctaaggtaggtgtttggttacagtctcttggagtatttttccagccaaacattttgcagccacattccatggcatgtggctttgaggtattgattacccgctggctcgcctgtcacagcagattcaaaggtattgtctgaagggaatctaggctggcccttagacctgtggcttccctgtagacagaggtcagtggctttgagttcacttgcctatcctgtttgactccatgacttcagaaagagccttttgttcctacctctaagttcagttaattggtaaatctatttcttttttttttcaaataacaaacactatgtttattaattaatatccctctattcaacccctctgcctcccacacttccgagtcttcattgtgtattattgcactctcttcatccgtgcaaacacattcttttttgtttttccaccaataccatggctttatttatttttttttaggttttatgtaaatttttctttttttaaattatactttaagttctagggtacatgggcaaaacgtgttatttttctgtactgaatgacaaccctgaaaaactgcactcaaagtgtttctgaaagttttatcctaaatgcactgccactcaatgtcagtgaaaagccctgctgaaaaaatccaggttcatggagggctgcccaaagaatgtgcctgctgccctttcctctggagcctcagcaatttaaattctctcctgagatgagacaagaaagcaggcttgatcaccacgatcgcgaatgggtggggtggtgcctgggacatgactttggaatttgctgtggggcacagtgctagcagagagactcactgagagccattgctgggtaattcccctatggatgtgatggaaaatgctagtcctgacaccatacagtgtcctctcttggaggaggtgaggcgagaaggacaaggaaggtattcatctgcctagtcactaccaggaattaccagtgaattacctagtcactaccagtgcccttcctgggtcactggctgctttttaccttatagacatggttggtggctcctccccaccaagcagggctgactctgtggtgggaaggttctcatggcaagtgttctgagaagttcctcactcttggctccactggtcttgtgtatccttctttttcctttggcacatttttctcaaccattttatattgtgatatatcagaattattttgtgatttacctaaaagattaactcttggataaagatataggtatagataatctactagataatcttttatctaaaagattaaattttttttacaagagtgaagataaatggtaactgcatggcctttgtatttgtcatggaacatgattcaagtggactgaatggtcccccaaaagataatccctggaacctgtgaatgtgactttatttggaagaaggctttcgcagatttaactaaattaaggatcttgagatgagatcatcttgaatcatttaggtggacctgatagccaatgacaagtgtccttataggagaaagacccacatagaggaggagaagacacagacagacaaagacagaagaggaggaggcaatgtgatcatggaggcagagattggagtgatgcagccagaagccagtgaaagctggcagccacaagaacagattctcctctcaagcctctggatggcgtgctgcccttctggcaccttcatttcagatttctatcctttagaactgtaaataatacatttttgttgttttaggccacccacagtggcttaaacagtgacaatttgttacagcagccctagggaacaaatatagttaccaaattccctttcagaccttgctcaggcaatgctaagagatctgatggttcaagacttgacttccaactttctttttttttttccttttgagacagagtctcattctgtcatccaggctggaatgcagtggtgtgatgtcgttcactgcaacctccgcctctcagattcaagcaattctcctgcctcagcctcccgagtagctgggactacaggtgcccactaccatgcccagctattttttattttgtatttttagtagcgatggggtttctccatgttggccaggatggtctgaaactcttgacacttcaggtgatacacctgctttggcctcccaaagtgccgggattataggcatgagccaccgcgcctgactgacctccaatgttttgggagtgtgacacttcgggcattcacccttggctgtacagctcacagagagttctctgccacagggtctaggctagtgcagcaaagtgtgtagcagaaaatccatccttgatgatatatctaattttctgacagcaaattataccagaagatccagtctcagtttctcaccattacattaaagtaacataatgattatcattataatacctatggagcacaaaatttttacctgtgttgctttgatatcattaagttgcactgagggcatttttatccatttcagtggagagtggagagctctccaagaggttcagcctctaggaggtgtcactgcaagggcagcacctatgtttcctgccgaatgttttcaccagaggccctacatggaatccactgtggacaactaaagcccagttagtctggggcaatgggcaagctgcttcataataaaacatcaattggctggatgcctttccatggagattttcaggccagagtcttacgaattataaagaccaatattttgctgtggtgatctaatgacatacaatttaaaagagcttcaagaagtggaaaggactctacatgttcatggtgttaataatcttaacaactattatcacaagtgccctgtagataaatgaacagataatggtcttggaaatacacataaaatataggctgtcaacagaactgatgaagaaaaacaaaccttcacttttgtttctacgtattatgttggttaatatgaaaggaagtgcttatgagtttacaaagcaagctttaaaacctttgtgagatgatactgtatgcttgattcatccaaccacagcatctgcagccttggtaggagtagaacaattacaggaggaatgccaagagagacaaagagccagttttcagcttttgacgtaaaaaaaaaaaaggggcccagaagaaggggagctcaaagcccatccataaacaaatagattaaaaagataataaatgatgaactagatattttgctttaaggagaggatccaggctccagactgtctcatctgggaggcagagaggctggggtcacttctttaaggaaggaaaggccaagaggcctcttgaggctgtaagaaccatatgggaggaaaaagaaaatttcagatatggctttgcccctgccccagggaactgagatggagacaggcctaagccagcagattgtccttggccattccaggtgagttagcctctgttttagttttctagggatgccataacaaaataccacagactaggtggcttaaacaacagaaatgtattttcccacagttctggaggctggaagtccaagttcgtggtgtcagcagggttgatttcattctgatgcctctctctttggctagcagatggctgccttctctctgtgtcttcacatggtcttctatgtgcatgagttccttgtatctctcttcttatgaggacaccaatcatattggatcaagacctacccacaggacctcatttaaccttaattatctcttaaaaggccctgtcaccaaacacagtcacattctgaggtgtactggagtttagaacttcagcatgtgaatttgaagagacacaattcagtctataccagcctcattaggtttttgaagggttgtattcaatttctttcactttaacatatggcacggggtcttaccactatcagctgtctgcccactgctggacaactcaccagcagaagggatttcccttgagcttttgctcagtagaagagaactaagttgtgtagaccactttctcttcaatggccaggattcctgaatctccccagatagcctttgatttatgttggccaacatagtatggcagaaatgacatttaacaggttctggcctgtacttcaagaggctgtggaggcttctaccctcttttgcaaccctgttgccactatatgaacaagtctgcattagcctcctggagaatgagaggtggaggccacgtggagccaagatcaccattccagcccagaacccagacatgggaggcagtacagccaagatcagcggaaccaatgcagtagctgactacagacacctgagtaagtccagtagagaccagaagaaccattcagctgaacccagccagaagtgctgacctgcagaatcgggggctaaataagtggcttttgttttaagtcactaagtattggaatagtttgttatacagcaaaagctaacagtacacagggcctaaaagatactctcttaggctcaagtggtagaagcattgtcaaagtcatggaaaggagttatcagagaccaataccatgttcttactagtgataatagtttggagttgggggcaaggggagcagaagtcttgggtttgggcacatcaattttggagaaaggaaggaagtttactctattttcaaatattgcaaatcagtggtttaaaaaaaatttctagaagtggaagcttcttttcaaaagaaatattatacagaaacttcaatgtatgaaatagacacaatttgtaatttattgatataaatctaacatatggtcaaatatataaaattgtttaaaaagttaatcaatgaaaacaagaaggataatacgattattaatgcaaacattcaaaattggatgtaaggggagacaggaataatcttattttagcacccaatcaatttctatatattattttggtagcagagtattgaaaatcctgataaacatctgtaagtagttgcagcaggaaacagcttttaacagctcactttgcaatctcaggatactcctcaattaaacaaagatgagaggagaagccatctgtcagcacagttactggaggcaggatcataatgatgcataacacaattgggtgtaggttttcttaaattatataaaaattaccttaaagtatattttttcaaagtgaaaattcaatcaatcatttgcagaaactgtgaagcacctcccagaagttcatgaagcacacttggaaaattgtctgatatttcattagggtagactttgaagaagaaattcggaagatgtgcaaagcttggaaaacagagttgcaaggaggcctcaggggtcacagactccccctcttcctttcaaaagcaggaactgaggcctggggaagaaaacacttttctcaggacttacacacaggtatcttcgctcccagttgagacctcttttttcaggagaaagagacgtgaacccgtgggagaaagagacatgaacccgtgggagaaagagacatgaacccgtgaaggagctgggtccccatcagtttcttttttatgctctcacaaaaagaccaaagtcgctttaaaagaatgcccaaataaagattcctatttccttgggaggattttaatagttggtataaaaagtctgcacatgtgaatttatgattgaatttgctttctaaaattcttaaaaccttagagcagcagccataggagtcagtgactgtagcagacacaagttgagaaactttctggtaccatgttagtcactaaagcccctccaccaccctgtcagtctgcatttccatcttggttcgggggaactgctcttccccactctgagccacgtgcttctaatgactccgcctccctggcatcagtgattggttggacggtgggaatcagcctccatctgggccaactgtagccctctgaagcctggctgtattcccagacctggccaatgagcatctttgcccaggatctttctttttggaaatcagagaaaccttctctgcctagtcccaaggctttgggtacatgggccacaggaagggatgaagataagcagatgaactatggaaagagggaatagagacaaagacacagagtccaaggactctgttttgttttgttttgttttgttttgagagggagtctcactctgtggcccaggctggagtgcagtggcgcgatctcagctaactgcaagctccacctcctgggttcacgccattctcctgcctcagcctcccgagtagctgggcgcccgccgccacgcccggttaatttttttgtatttttagtagagacggggtttcaccgtgttagccaggatggtctcaatctcttgacctcgtgatccgcccacctcggcctcccaaagtgttgggattacaggcgtgagccaccgcacccggccccaaggactctttttaatgctgtgagggcagttccttctgcccttactgaggtttggttactgagtctaaaacttccttttcttcctacagtgagtttgaattgggtttctgtcacatgaaaccgcagaatcctgatgaatgtggggaatacttaaaaaatataatgacttatttgctagtgatagagacaggagacagctaagggtccctggcgaaaccccaccttcaagcctaaaacagcctgaaggctgaacaaccggactgctggtcccagatgaagccctccctttcccagctgatcctttcttaatcacgccgacctgcgcctgcgcactgggaggatgggggtggagcctcgggaaggtcaccccgtttgcgtggggaggagcctggcctctcctgttcctgtgtggtgacctgggattcagtctgtgaggcgggaaatttgctagcaggactctctcttgctctgctgagaggtatctttcttttttcctttttgcccagtaaattccgttttcctcacccttctatgtgtccgtgaacctaatctttcctggtggtgtgaaaagagcccagttttagctgaactaaggagaaagttctgcaacagtaagaaaatgaacatatgcactggatgcagattttgcatgaaacttaagggaaaaatggacctcaccaactggacttagtgggatccaatgaccccaattacaaaacttctgcaatgaaactctggtaacaaggggctggatttgattatggaattgaggttggtcaatctaacttttctcctatctgagtgctcagggctgcatggaatgtgaaaataagcagctactggttgtgcataattctgagctatgagttaactatgaatggggttaaaaaaaagtacgtgagccagctgtggaggcagatagacatactttccctatgggatttatgagtattcagccactgaagaaaatcagaattataaaaaaattccgtttcaactggtgaaactgagaccctgtaaggacacttgaattggccaggagagacaatctgtccctccgtatatattccattttggttggtatcatcaaaaagatttacctacaacctgtggagctcaacctaggtgttgacgattgaaggtaaatttgcaatctgagagctgcgcttcacttgccagggctgaacagcgctgtttttcttcagtggacatctttcctatcccatcaacctctcccaagcttttaaaaatctcatctctttccacaccaccttgtttttcatgatccagcttctcagtccatgtaccctgtgccaacacttcttaaatttcttttttactttccgtattttgctgaattttattacaggctcttggcttcttaggaacagtactcctctactatgctgtgttccctggggcctcttaaatttattatctggcttattgctagtgaattcaataaaacaggcttttccctgggacttgactttgcctcttgctcaagcccgagtctactggctgcccccagtgcttggtctccaaagccaggctacagggattgaaagtcagggatgctgccatctccatagcacttcaaactcagttctgtcctgatttcacatttcaactataggatgttctgccaagtgacagggcacaaaaagagctaagcctcttttctgtactgtggttttcattaagtgcatatgtgtgtgcctgcctataataacaggtaagaacttatgtctagtaacttctgttctgctacagctgcagctggttagaatgttatccctacttggcttttggccatatgcaagcctacttcagcagaatccgcaggctctcatcagcctctagcttaatgaataattacaaaaaatacaggtcagcacctgccaagggggcagagcagggatagctttggctaaatcaaggtctctgtatttcccatttttctttaatgcaagacttcttggctgctcttcctcagaaagcacaggaagctgaagaaattccctcttttcttggcaaatgatgctttctcaactttccttcatggctttttttgacattgattttatttaggctactgcaataagaagagcactccacatccaaatttcagaatgtctcagcagggtggttttgctctagacttctacagggaggagtagacaagtgggatgattttacagttggaattgtttttgttcaaggctattttcaaagaagataacaggccattgactaacagcccccaaatcctggtgtcatctgtttccaatgatttgttccacagatatttactctggctctgcaacagctatattagagcgaccagggcaagctgggggcttttcatgccaagggcaagtgaccattccttctcacatgaagctccagacagcttccatgaagttacagctggacatagtggaaaatcaaaaaattatatggtacatatggagaggatgtatatagtcagggagggaccacagtggggagaggtattcagaaaagccttcccaaaggaggaaaagctgggacatctgggcatcaaaggacatagggtggtggagctggtggttaagagcatggattctgaagccagaccctttgggtataaaccctgcctgtggttttctagctgcctgactttgggcaggttatataactttctcgtttccagtttcctctataaaatgaagtaaagagcagtactggccgggcgcggtggctcacgcctgtaatcccagcactttgggaggccgaggcgggcggatcacgaggtcaggagatcgagaccatggtgaaacgccgtctctactaaaaatacaaaaagttagctgggcgtagtggcgggcgcctgtagtcccagctactcgggaggctgaggcaggagaatggcgtgaacccgggaggcggagcttgcagtgagccgagatcgcgccactgcactccagcctgggcgacagagcgagactccgtctcaaaaaaaaaaaaacaaaacagtattgtatttgtcttctattgctgtataacagagtaccacaaacctagtaacttaaaacaacactcattaattagctcacagttttgtaggtcagatgtccagcttggtgtggctgtatgctttgcacagggacttagctgaatttaaggtggtgtctaggttgatttctcatctggaggttctggggaaaaaaatctgcttccaagctcattcttggtggtggcagaattcttttccttgtggcagtaggactgtagtccctgtttccttgctggctgtcagctggggctaatcttagcctaaagattgctcctatcccttgccacatggcccctccatcttcaatcagcaatggctcatcaaatccttattctgctttgaatctcacttcctctcctgtgatcagcccaagaaaactctctgctttaaatcattcatggattaggtcacgctaaccagataatctccatatcccaagggtaactggtacggggccttaattacatctgtaaaatccctttatagcagtacccatattagcagtgggctgaacaactaggagaggtgtgtatgccagggctggaaatcttggaaggctgtcttggaattccatctaccacatgcacctatttctacagaggttatgaggcttaaaataagtgtatgtaatgtgcctggcacataacaagcatgttttaggtaggagcatttgcatgcaaaaaattagccacttgggttctcaggattgatgagaacttggttgtggtgaaagaagagtgttgttaggaacaatggaacagcctctggttctcagctgaagggcttcattttgatctatttggaagcaggaagtgcctgtctttcttggatgaatgacactgatgctctccctgatttaggtttttgctgtggcaacagcagtgaggacaggctttggaatgagggagaaaaaacctgataatggccgtctggaccagccctctcagaaaccatctgcttgaagcttttgattctgagaggagtggagaggtttcctccaactacaagttcagggatttggaaaccactaaaataatatcttttccaaaactagtccagcaaggctctaattgggagaaatgggaaatggaagtcaggctccccactctctctgctaaccacacacgggccgtggttgaggtccatttccaaatcacaggaggccacttcctgtcttagcttagcattgttggcgggagaatctaacaaggggccaaggccctgttgactctgggagagaagcaaatggccaccatccatgagtaagaacctggactttcatccagcctgcgggttgaattgcctgctcacaagaaatctaggttcagagcgttctagggcaggcacaaaataagcaggacagagataaaaagatgggagtgagaatggagagattgtatttttccttccacagatgccatgggggagctggggcagggaggagcttatcttccccaagctcctagacgaggcaattcttatttctagctgaattccttttcatctctcctgacttcttctccacccttctcctctatctgccttggcttctggatcttctcaaagcatcccccagaaaaacttcagccaacttactccctttgaccaactgtcatttttgaaaagctgcccagtctctttgcggtgattttcaaagagagacccaggactaggttttctttcagtgacagcaataggtaggaggaggggtgaagaagacaggagtttctgatgtgggaaaccacacacacacacacacacacccctaagaaatgctgaatctgtaattgcaagacaatataaccttcctgacatctgaggaagatgtcaagaaagaaaagcaaaaactcatatttgtgttatagctgctggggtttctacattagggagagctgaccctgtttgaccttgcctgtcgagaccagagggttacagagagactgaccaaagatatgtggccaaaaggccaatcatatgtgggcaaaactggccaagctgatcagtttgacacgtcaaaagacagatgttgtctgacttgggcagcttgtgggccagagaagaaatccaaagctcagtatctaagaatgcaaaggcgagcaacagtgtgaaccatcacctgtgctccaggtaaagcctgcctgccctgcgtcatcacttattcaagcaaaggactaagagcagcacaattctggcttgttagtgtatggcctgaaagtgaagacttcatttcccttcttccctgtgcactttcctcgtcactgttcaatacaggtgccaaatgtgtcatcatgcttgatggagcctggcgttggctggctggctgtgatcagcagctgaccacctgacagaaacactttccctaattacatttttaacttggattgtgccacacttagttacatttttggggggaaaagaaaggaagggagggaagaacagtgagtgaaggaggtttgcagaaagcttcagggccagatagcacacagacagcccaccttaaaaatcaacacatcttcccatttgtaacttaactacatgtctaaatgttgacatccagtgaacaaatattaattaaaaacccaagacattcaaaactgcacaaatgtcatcttccattgtgtgaaatcaaaaaggaacgtgtgggtgagtggggaggtggggagacacaccataacctacctcttattggtaatgagcttgaattgtggaaggatactttctgacttcataccatttcttattagtatgatggtcaaaattacaaaaaaaaaaaaaaatcactcagactaatggtctcttgtgggcaagtggcgaagaacactgatttggcttattttattctctgtacttctcctggtgtggtggacagtttgctgatacaattattttggataggacttcatgttaggtattggcatggaggcatccacattttttttttttgagatggaatctcactgtgttgcccaggctggagtagagtggcacgatctctgctgactgcaacttccacctcctgggttcaagtgattcttctgccgcagcctcctgagtagctgggattacaggtgcccaccaccatgcccaactaatttttgtatttttaatagagatgggatttcaccatgttgaccagtttggtcttgaacgcctgacctcaggtgatctgcctgcctcagcctcccaaagtgctgggattaccagtgtgagccactgtgcctggccctcatatgtttataaatcactagattttaaatattggcagggctacaaacaaggagagcttgtctgtgaagagaaaaacaattagcaaggtccttcattgtttcttcctctgctgtccattctatttatttgtctgctgctaggatctaggggtgtcctcgaccctgcacataatggcaggccccctgtcttcatcagcactgctacatcctcatatttggcagggagcactctcatttaaggtaatgagtgactccctttcacaatagaactctgagtgtggctcaaattcaccctggctaatgaatcttctgtatggttttttttttttttttttctgaggcaaggtttcactgtcacctaagctggagtgcagtggcacagtcatggctcactgcagcctcaaccttctgggctcaagcaatccttctgtctcagtccctcaagtgactaggactacaggtatgtgtcaccactggctattttttttgtttgttttttgagacgacatcttactatgttgcccaagctcatcttgaactcctgggctcaagtgatcctccctctgcctctgcctcccaaaatgttgcgattacaggtgtgagccaccctgcccggccttgtgtttcatttttaaccctgatataagtaacaacacatctgcttattaatatgttcatgttaacatttactatccagtttgggtggaaggagagtgttctctgcctctgaggtccagttttaacatttataagtgcagcgggtcctcctgttgtggcccacaaaccttacttgggaaaatgtcacatttgagcaaccacacaaaactactctgtgatctctgaatatagtaaggtcaccagcccccacttgatcttctgttaaatgaccaagatcatttctggtcagaaagtatgtgtgtttttgcgagttttttttgtctttgttgacacataatggtgtagaaatcaagcttaaaactgattgtagaacagtttggtgagaaagatttttgcttttctgccataatattcccctggactttgcttcgggtccaaagtaacaccgggaagtttaagaccacagaaatgtgactaaatgaatgctgatcacatttacaaaagcaagtgactttgtccaaagtctctcattctcagatccatagtagacatatagatactttttctaagggcaaaatttcctggttcactaagccagacttccatgttattgacgaaataaagataatattgaaaatgacagtgtctgagaagcaatctcaaactgccttttattactgcacacagttaacgtggaattgagaatcactttctttctaacataaaatgtgagccgtagagttactactgaaattcaccacagtgattcagccaacaactcaacttattcctttgcaaaaatttctgaaggtttttttttctcccttcaatctcagcattacaaaataatgagcaaacagttaaattggcccagctctgagtttcaagagagatttatggtctgctcatcctctggagggaccataaaaccaccgatgacatcttactttgaaatctcttgtattaagtaaagagatgggtgtggtgcgatagtgaactctgcatgtgagtggtatttagacaagttctgtacttcaaaacagagtccttaactcatacgaaggcttcctgccactagcaagggatctcagtaatgagcgtgctgccttccctaacacccccatccttttccagaaagattcttaattttatcctaaatatatttgatattttttcctctgtattttgctttgggtttaaaaaattccctgaaagatttttttctcgtctgtggaagcatcaagccgcagatccaagtcagtccaaatcaccaggatcatacaagacgataaaagtgccttcaagttctaatacttgctggatgggcccaagccgcgttttaaatgtgaacaatggggtggctgcggcagagaactgaccatttacttcctgcctcagatgacccccttgtgatctctgaaactgggcagaggaataaggaaagggaaagaactgggttttggggagaaacatgctttctggaaggcgcccaggtttacccaaagagcacagttaagtgctgaatttcaactagctctggagtcaccctgtttggggcctcattctggaaacccgaagtccagcggcagctttcctccacatcaggacagagagtggggtttgggagcggacgagggagcgggagtggacgagggagcaggagtggggctcaacgacgacccaggcgctcaaggggaaggggctgagagcgtttcttcgctgtgcggctgcaatagaaactttttcctcgtactatctgactccgggactggactgtgaggtctgcaacagctggtggggttcgggtggggaacacactctaagcccagcgccagggctggagccgtgggtggagccgctgcagccctgggccgggggcgtcaggaaactcgagactggggcgcggggaggccccggccagagcgcccgctctcccgcgtcccgggcggggtcctcacctgttccagcgggccaccttcctccggtaataccgcagcgcctcctggctggccaggagcgagtcctcggctcccaggagaggcggctcctccgggacgttgtacagcgggtgggcgaagagggcctgcaacttggagctcgacccgctgtggctgccgccagccggttcagtccggggctcggttcgggaaaagttgtgcacgatcgtgccggggtccgaggcagctgcggccgagtcccgcgccagggaggaggcgcggccggtgcacgggcacccccgcgggcgctcccgaggccgcagctggcgctgtacttggggccagaggtggaagtagaggtcggcggagagcagcgcgcccagcagtagcagagtcagtaggcggtcccggcgcagccccggcatggcgtgctggccaagggggacgccgggggcaggccggctgtctccggggtcccgggaggggtcgcggggtgcgggcagaagaggtgcctggagtcccgcgggtgggccggggtcagtgagaccggaatgctccccgcgcgggctagtcccctgtggaggggtgtcgctcctcaacttggggaccaggtgcacggagcaccggggctctcggagtcagcgggcgtcgcttctccgcgccgagtgagccgagggaatggggttcccggggtgcccgcttcttgcgccttttctcccgtgcgcccgcccgcccggacgctcgcggcaggtgaagggccccggggcgccggcgccggctgccaccgcgggcggacgggcgacggggcggggggcgaccgcggagggcggacggaggccgccggctgcaaagcccggggcgtctctcctgaggatgctgtcgctcggcggcggctgctagtgctcccgcgactcctcctgcgggcggcggagacgccagtccggcggctggcacgggcggcgcgagtggggagttggcgaagcaggagcggctccggggagcttgtctgtgcgcctggactcctagaggcagaggtagcgcggggcctccccgagcctggcctggcgccggcacccccacccactgtccgctggcacctgcctctggcgcagctgacggccaactcccgatccgaagccggcgctgcccttgcaccttgtcacccacccactgcctgcgccctccccctcgctcgggcctcccactttccctgcccaggtctcaatccagtcactttaagggactcacgcgaggggtccgaagcctctttttaccatttctattatttttagggaaaaaaaaaccaccacaagccccctaaaaccctttttttcctgtaagctttgccaaatgagtgtgtggggggggggtggggggaggcgggggtggcagtgttggtatctgttctttctttgtgttcccttccacctccgcccccctgcagagcgcagggcacatcaagattcataacaactacctaccacatgcctggcacatagtaggtgctcaggaaacacgctcttggtgaaggaaagagcttgacctttaaaagtaaggtatcagttttacctagaatcttgctgatttcctgtttggaaggagtttgattccaactctgcctgtactttaaaaagaggaaatgtttcttgcactcagggagggaggggccctgatgaccccactccgaacttttgagtttagcttggtgtgaaagtagtccacccaaatgaatcactggaggacacatttaggctttctccaatattctgtgaggtaatgtaccctccccacacccagttttccttttgaagaagagggagggagtcctgaactcctggctcctctatttaatgaccccatagtatagtaaagtgaagtctgattggagaggcggccccaccctgctgaatttcaggaaatccaccagaagctgcttgcccaggcagcaaagcttcccatgtaagttagttctactctttaaccccctcccttcccttgctggaattgagaaccctcagacatactttgacttgtgggttcagaccagagttcttttccccgtggttcagtgtaagatttcttcgggactttgcagtctcctcaaatgtaaatgaagataatgatggaacctacctcctaaggttattatgagacttaaatgaattgaagtacaattatgtgtcacgtctgagaaatgcatccttaggcaattttcctgtgtgtgtgaacatcagggtgtacttacacaaacctagatggttcagcctactacacacggaggctacatggcatagcctgttgatcctaggtacaaacctgtacagcatgcgactactgaatgctgtagggagttgtaacacagtggtgagtacttgtgtgtctaaacataggaaacatacagtaaaaatacagtattgtaatcttatgggaccactgttgcattgactaaaatgttatgtggcacttgactatgtataaattacttagaagagctcctaactcatcctaaataagtgtgaaatatgtgtttgctatcattatgattacttattagttcctgtagtacactaggcttggttagagactgctcatcgctaggacaaaaatagaaaaggatggaaaaggaagatagcaggaaggaacctgctttcaggggcataacattgtggcctgagtgcccagtccaagtgaaaaagcccaagacggtactattcccagctactccactcctctgggtatgatggtgggcattttgaggggttctagaacctcctcctttttatctggaattaaattttaactgatttccaatttctgagagacgttgcaacttctaatgtgtttaattagatgtcatggcaagcgaatgaagaagtcaggcattgaatggtggtgatgtaactgcagtaactgtgtggcaaactgatgcgcatttttctcggctggcaaaggacgtggatgtggtgacactgcaggtcttgtgacttcaattctcctcaacccatggggtcatactcgcttagtagactcttttttttctggccccaatttagggaacaatagtgtaacttgcttggaaattatgtaaacatattttccatgccctttaaaggtcacagtcaagtgcagaactgcatgtgggagttagatattaagtgtgaatgaagctggataggagagtggaaatcctaccagtaggattggccaataggatgttggcttcctcaggtttgcctctaatctacctttacccctcctagaaatgagccttctcctgctcctccgatcttccatgtcttgggccctggcttacttgccagcctcacatacatcctctccgttcacactgaaggtatcctaaattgctgtttgctgggacccatcattctgtttaaaatctttcattggaagcccctccctccttttccatctctactgatcttgatgtatctagagcctcataatctcttgctcatacttgcaaataggcttctaactggtccctctgcttccatggtaccttagttcagtgcccacacacactcttgccagagtgagacttctagtatgcagaggcaaccaggatattctcctcctgaaaaccccctgagcttctccttgttgctggattaggtcactcattgtgacacagctcttcgtggtctggcttctacctcctttcttctttatatgccccctctttcgtcttcaccccacaagactttctgcaattcccaagtgctccaaccttgtaggggtgggttgcccctccacacctgtgggtgtttctcataaggtggaacgagagacttaggaaagaaaaagacacagagacaaagtatagagaaagaaataaggggacccggggaaccagcattcagcatatggaggatccccccagcctctgagttcccttagtatttattgatcatttgtgggtgtttctcgaagagggggatgtgtcagggtcacaagacaattgtggggagagggtcagcagacaaacacgttaacaaaggtctttgcatcatagacaatgtaaaggattaagtgctgtgcttttagatatgcatacacataaacatctcaatgctttacaaagcagtattgctgcctgcaggtcccacctccagccctaaggcggtttttccctatctcagtagatggagcatacaatcgggttttataccgagacattccattgcccagggacaggcaggagacagatgccttcctcttgtctcaactgcaagagacattccttcctcttttactaatcctcctcagcacagaccctttacgggtgtcgggctgggggacggtcaggtctttcccttcccacgaggccatatttcagactctcacatggggagaaaccttggacaatacctggctttcctaggcagaggtccctgcggccttccgcagtttttgtgtccctgggtacttgagattaggaagtggtgatgactcttaaggagcatgctgccttcaagcatctgtttaacaaagcacatcttgcaccgcccttaatccattcaactctgagttgacacagcacatgtttcagagagcacggggttgggggtaaggtcacagaatctcaaggcagaagaatttttcttagtacataacaaaatggagtctcctatgtctacttctttctacacagacacagtaacaatctgatctctcttgcttttccccacacaacctctcacagatgtgtctttaaccgaaagctctttctcctttccccacctggaaaacacccattagtccacccaagctttggccacttgtccaatttttctctgatgcttgtcttcatacccattaaactcagtgccttgtgctctcatgtgcccccacagctcctcatatgttcccctattacaacgttggccatgttgggtttcctttttagtatgtgttatgggttgactatatcctgctctcaaattcacttgttgaaatcctaacctccaatacttcaggacgttaccttatttggaaatagggttgttgtagaaataattagttaagctgatagcgtactagtgtagagtggacccttaatgcaatatgacttgtgtccttataaaaaggagaaattgggacacagagacatgcatacagggagaatgccctatgaagataaaagacagattgggcaattcttctataagccaaggaataccaaagactgccagcaaacacaagaagctaggtaagaggcatggaacaaatttgtccctcacagccctcagaagagtccaactctactgacaccttgaccttggatttataattctagaactgtgagacaataaatttctgttgcttaagccacccagcttgtggcactttgttacagcagccattgcaaatttacacagtacacatgtctgccatcttcactggagcactactcctgagtgtagagggagaatgctacttatatatgtacacagagctctgaggatggggcctatcatttgagaaatgctcaagaaatgtttgctgagtgaaggcagagatattggccatctctacaactgtagaatctcgcatatggcctagtatacagtaggggctaaattattgtttacaataagatgacatagctttggaccctgtaggagacataaagaaatatatgacacaattccttcctgccttcaagagtcttgtgatcatcagagagtccagctatacctgtactcacaagccaatgggaaaaaagtatgaggtagtacacagagcagattagcaatctgtgccattgcatgcattaagaggagcaaatgcaaagggcagttgtgtttcctttcagtctagctaaatatcaagctctctacttgcaggagttaaatcatgaaaacaatagagtcaacatttaaacaccaagttcctctatctgtgaaggttagactctatttttatcttgcccatgttcccgtgttgcttagaacttgactagttgttttttgtttgtgtaggcagttttctatactagactataactccatgagttcaagggtaacatgttttcttttttattttcctgtcttcataggatcttagacacagcaaggcatgcaaatgagaattaacaaattcctgcagaataaatgatgtttgtgggtttatgtgtgttcatacatggaggtgggaagtggtttggaaaagagcacttaaaataagaacataaatatatataatctagctcaagataagtgttaagttagaacatctacataagtgttaagttaaacatccgttatggattttttttttctttagacagggtttttctctgtcatccaggctggtgtgcagggtggcagagtgtgatctggctcatggcagccttgaactcctgacctcaagtgatcctcccacctgtcagcctcctgagtagctgggactacaggctcatgccatcaggcctggctaattttttttttttttggtagagatgggatttcaccatgttgctcaggctggtttccaactcctgagctcaagctatctgcctgtttcagcctcccaaagtgttgggattacagacatgagccactgtgcctggccccagtagatgtttacttagaacatcaatggaaattgccttgatcctattgaaaaaccaataggtaagagacacataaagaaataactaaatgtagacatctatgtccctcacagtttttattatagtatagatgcatgtgaggaatgttacctttacctgctagctgtctcagtaatcagcaagagatgcaattgaaattactataaatggaagacctagaatggagtgaacttaagaaactgaaactgatttagtattgcactcaacaccttattctgaggtagaaagtccaaaattttctaatcgtgaccaacacataatgcctcagcataagccagagatttctcaaagtgcagcctgtggatcagaagtacctgatgtgcttataaaaatgcaaattccagggccacaccatagttctagtattttttggaggtggggccaggaatgtacattttcaataagctgattcttaccagcttataagattctgacacacattgaagtttgggaatcactggttgaaaggacagtgctaatgagagcaaagtcacagatttgattccaaataggctaggtaggatccattgtctaacattggccatccaacttgtgtcataaggttctaaggcgctaaagagagagagacagagagtacgtgtttccccatcattgctactggggaacacaaataaacaaataagtgcctgttctttacaaatgatgggtatgtagtgtgatcttgctataaaaagtcatggctgtacttattggtaaatttcccctgggaaactgaactaccttccctggatctcagttgcctcatttgaaacatgaaacgctgaagtgaatgatctttaatgtccttttcagctctaaagaatgagaattttacttttttttctactaagcatatattaatctagaccttttcacacaactttatttccagtataaaccaaatacttgagaaagcaaaccaaggcattttgtaggaagagtaagagcactggattgggagttagggagcttacactgtaatcttggctcagtcattaactagtttggtggcatgggacaaattaattaatgtctctgggcttcctttgcctcacgtgtaaataactattttgtggtagacaatttcaaagttctcttccagcattgagttccttcaggagtgaaaatgaggtaaagacattcttagatgaaagaaaactaaaagaaacaatcaccagcagacctgctctaacaaaaatgctaaagaaagatttcagatggaaggcaactgccaccagagggaaacctggaacatcaggaatgaaggaagggcaacagaaatggtgaaaatattggtagatataacagattattttttctcatcttaagttttacaaaatatacctaataattgaagacaaaaattatagcattatctgatagagattcagtatacagagacgtaatacatatgaccactacaatacgaagggaagagggtaaagggacttgtttgttggtaagaactctgcattccacttgaagtggtaaaatattaattccaaatagctgagaagcattaagtatatatgttataattcctagattataatactatactgtactaagagatataataaaattaaaaactatactgagagacataataaaaataataaatatattaaaatgaaacactaaaattacccaaatcatacaaaagaaagcagaaaaggggaaagaagaacaaaaatataggaaataaacagaaaacaaattataaaatggtagccctaaatgcaaacatactgataattatattaaatataaatggcctagacacaccaattaaaagacagagattttcagaatgaattaaaaaacaactcaatgttatgctgcctacaagaaacccggtgtatatatgaccactggtaacttaaaaggatagaaaatgacatatcaggcaaacactaattaaaaagaatctggcataattatattagtattactcaaagtagcaatcaaaaagacaatataccaagaagtcataataattctaaatgtgtatgcctctaacaatacagcttcaaagtacatgaagtaaaactgataaaactgaaaggataaatgggaaaattcaacagttatagctaaagactttagtgtttctttttctgccactcacagagcaagtagacagaatatcagcaaggatatagaagaactgaaaaatactattggccaactaaatctaatttaacattcataggacacttcactcaaaagcagcctaatacacattatttttaagtgtacatgacatttaccaagatggactatatcctccattataaaacaagcatttaaatttaatataatcaaatcttacaaactgtgctctctgctcataatagaaatagactggaaataaatgacagagagatatctggtaaatctccaaacatctgaaaacataaacatgtacttaccacatgacccagtaatccactgctaggtatttactcaaatgaattgaaaacttatgtgtgcataaaaacctacttatgaaagttttatagcagctttattaataattgccaacattaagtagtgcatatgtccttcagtgggcaaatagataaactgttgtacatcatacaatggaatactacttagaaacaacaaagaacaaaatatgggtatacatgacagcattgatgcatctcaaaggcattatgctgagtgatagaatccagtctcaaaaggttacatattgtatgattacatttatatgatagcctagaaatggaaaagctatggtgacagagaatagatcattggctgccaggcattagggaccgtgatgaaggtatgactacaaaggtacagcattaggaagttgttttgggtgatggaactattctatatccttatcatgatggtggtcatgtgaatccatccatgtgttaaaactgacagaactgtacattaaaaaaagggcaactttattggccctattgttcaattatgttaaaacaaaataaaataaaataaaaaacaaaggttgcatacctccatccaaaagaattttgcctgtagcctggctcataatagcaaataattgcacaaaaaagtaaacatccatctatagggaaatatgttaataaattgtggtattattatgtaatgagcagttaaaatgaaggaagtacaactgtattttctcagcaaagatacatctttaagttgtaagaaaacatgaatatggggtgtgtgtgtgtgtgtgtgtgtgtagcagtatgatactatttagataaccttcaaaactggcaaactaggccaggcacagtggcttacacctattactccagcactatgggaggccaaggagagaggatcacttgaggccaggagtttgagaccagcctgggcaacataataggacccctctctacaaaaaattttaaaaattagtcaggtgcaatggtgttcatctgtagtcctagctacatgggaggttgaggcaggaggatatcttgagcccaggagtttgaagttatagtgagctatgatcatgcaactgcactccagtgcctggagaccctgtctctgaaaaagaaacaaacaaaaaattggtaaaattataaaaacatgcatgagaataatgaatactgtcttagtcagtctgctgctataacaaatataccatagattgggtggcttaaataaaagaaatttatttttcacagtactggagactggtaattccaacatcaaggtgctggcagatccagtgtctgatggggacactcttcctggtttgcagatagcccttttttcattgtatcctcacacactgaagaaagagtgagcattggtcctttcatcccctaataagggcactaatcccatttatgagggccccatcctcatactctaattaccccttgatatgatttggatgtttgacccctccaaatcttgtgttgaaattttatccccattgttggaagtggggcctaatgggaggtgtttgtgtaatgggagcatatccttcatgaatatattaatgtctgggagggtaaggaagactgttctcattctattagtttccgggagagctggttgttaaaaaagagcctggcatctccctcccctctctcttttgcttcctctctatggccatgtaatctctgtacacactggctccttttcaccttctgccatgagtggaagcaacctgaagccctcaccagaagcagatgttggtgccatacttcttgtatagtctgcagaactgtgagccaaataaacttcttttctttataaaccacccagcctcaagtatttctttatagcaacactaaaatactgagacacctcccaaagaccctaccccttaataccatcaaattggggatttaacatatgaatttgaggagaacacagatattcagttcttagcaaacaccaaattcagcacagtgattacatatggaattaaagtgagaaaaaagtgcttgttgaagattatacatggggcttcagcagtaactgaaatgatttcttagaaaaaagatctgaagcatatattacaaaatgttaaaatttgacaaagttgggtagtgctatatggatgttggtcacattattctctatcacgttatgactcattctctttacttttcatatttacaatatttattaaaaatctgacttgattcattttgtgacctcatatcctggactattctaggtttttaaagagaccattgaaagaaagcgttgggctttgacattaaggtgaagcaggttaataagcagcagcagtcaaagaaatttgctctattttattttaaaggaaatacatggtagagggcaaggaatatgtgtaagagcaatttcaacttaaattaactgagtttatattttaaaaggggaagaaattcacagattttatgcgtggctgctttcagactgtgcaattcatctgaacagaactcttgcatatattatgtgagctttacatgccagactgaacaacaacagatgtgttttccctgtttcagtttttactaccttgacagtacagctattcttagaaggtgggaagctgggacttcttgggtctttagaatgtcatgtcttaaagtatcataactgttttctagcaactcctaatccactgtatgaattcacagctagtgggtgagacaaacattaaacaaatgtaacacaaataaatatcttggtctggctcaaagttcagtgtcagaacgtcaatacagctaaaataaatagaaatgactccaaaaagctttgaaaattaacataggtcttcactcagtaatttttgagggaatggaaaaggagaattacattatggaggtatacaattgttagtattcctttctaaacatccacaatacatgtctctctccacaaagttcaggctttgtaatctccttttcctttttaccctctcaccccaattcccataaactcctccccacctatgcctgttctcttctctttatttcatcccacttcagtcctttcatacatagggcaatagtctccattcttaatggcttctgtctccctctccattcccaatgcagttcagcctgatggaggtctattagctggctgcgtaattaaaggactcttctgtcttggaaggagaatttcaaatatttatatttttatgatattttagttctgacaaatgaagaatcataaaattataagttacagtggggacagatacaatgacatcatcttaactctcttcgtgctgcttttgttttttaaatttggaagcaaggatgaaaggtgtaaaagatgattaatcattttggaaatagatgcatgactacagcctaagtctgtggtgaaccaatcatgctctcttcctttctgtgcgttagactaagtcctacatttcacaaccttccacagtgttcacttgataactaggaaaaggcaaatggaccccatggcttctacactctccctctgttctttcacagatgtatgctggccatattttatgaactggaaatctggacttagggtcaaactcatgaaacagggtattaaaaatcataagtcatctatcccagaagagtcaggaactatagttgccataactaggcacatatgctaagccctcacttccctttgatgttctagatgcagccttagagggagaagtcagtggacacaactggagcccatggtatcaggtctggacaaaccagtttcaaagctgagtgctcagttttgcaaaggaaggcagtaactctgactagcagcagtagaatctaggcagacagaggactcagtagcaccatatcttcatgatgtatttatttttaattctacaaataatatatgaatattctctctttttaaaatatttggacaatagacaaaattttatagtaataagtgaaagtctcccttccttcttcctcttccctatctgattttcttccccacaggtaaccattgttggtttgatatgactccttccaatgctacatatactcaggtagctttgcctctaccttaatagtaatcagataaatgcaaattaaaacaattgacaatagatcatttgtttcttatcacattttcattgcaaaaaaaaaaaaacaacaacaaaatatccagaattgactaggacttggggaaggaattgtaaattgaagaaactgttctggaggttaatttggtaatgtaaatgcctacagactttatatcagtcaggatccagttaggagatgaaaagcataccaattatttgaaaaggaaaaatttaataaaaagaattattaactagtaaaagtgataagacacctacctgtaaaagggatctagaagtagcagctgcaaaaattaaaaaaagaagctgctacatctaagctgaggaaaagtggatctaaggactaggagggttcccctacccttaagccaaggctgaagtttagacctcgttatagagagcatgtttaccactggaaaaaaacagccactgttggtgaagaaactttctggatagcaggccatgttgatctgtcaaagagcccatgggaggggctaccgatgcctgaggccatggtcagagctactgtggaaacaaccacagagtggtggtggtggggagtgcgacttgatagtgtggttggagctagttggtgaaggctgcagggctcccatgctgaagtaaaattgaggactgggacccagagaagtgtcttcctgccactactgccttgcagagttcctccagcgccctctattgacaaagcctattattgtgacaactggtaaaggaggaatgtctagagggtccagctccagtttcataaagcccaacagagaaaggtaggtttggaactgagaggcaacaaattcgtaactggtacagactttgacttctgaattccatttataaaaatttgaggaaatcattaaagttgtatgtaaatatttagataaaaaatggttattacagtatagaaaaaaatggaaataagtgtaatgtttgaaaattgaaaactgagcaaaataatggtttatctataagattaagctgtatttatttattttcataaaaagatgtttatatcactagatggaaaaggtgtgttaataacaatcatatcattacccattaaaaacatacttatatatatatttctatgtatgcatagattaaaactttgagaagtttggtgtctttcttttttttttttttttttgagatggagtctcactctgttgttcaggctggagtgcaatggtgtgatctcggttcactgcaagctccgcctcccaggttcatgccattctcctgcctcagactcccgagtagctgggactacaggcgcctgccaccatgcttagcttttttttttttttttttttttttttagtagcaatgggttttcaccatgttagccaggatggtcacaatctcctgaccttgtgattcacatgcctcagccttccaaagtgctgggattacaggtgtgagccaccacgcccagcctgtttggtgtgttatacaccagctccttggtataatatctgagttacaatcgttcaataaatatttactgaataaatatattagcttcctcaggctactgtaacaaattgctataaagttgccacaagcaacagacacgtgctcttccgtaattctggatgccaggagtctgaaatcagaacacttgccattacatatagggcctacaagataatccagacttgtctcattttgagatccttaacataattacatttgtctttgcaaagacccttttcccaaataaggttacatttacaagttttgggtggatgtatcttttggaaggtgaggtgagggatgagtaccactcaacccattgcatgcataaataaatatatagcaacattttacattggtttctttgggtggtgggatttatgaataatctgaattttctttttccttttttttacttactagtattttatgatttttatgcaaagatctttacactactttagaaataaaaggaaagtaaaaatgtacttggcatatgaaaactgagagactacattcaaaaatgctgatttgatcatcttgaagttatgattgaacccatggttcacaaactccaagtagttgtgtgcactacagagaaggaaacagtaagagaaaataaagagcctcaggaggagggcaaagtcatcacacagaaacctaagttaatttatgttctatgggtaagctacagacctcccagccgaaagctgacacacggaagctgataaccagaaatccacgcttagccttctgggcatctctgaattgagcaaacttgtggtctgcataacacttgccatttaggacagcagtttggaatcttcctgcactccggacctcctcttccccttcctttttgtgttacgattcattgatgaattcttagaaggtgctgctccattaaaataggaaggtctgtgacgtcaaaagatctgaggataaaaggcattttaaaaggctgtcatctttcttttatttagagaggcaatcttttcaaaaggaaagacagaaaaacattggaattagggcatactcatctttttatttctcttaaagcagtagatattttatttccagtctcttttggggactagctttttttaaaatttatttatttatttatttatttattccaaaacctgaagtttaaacctctatcttaaaacatggccgaatatcaagtgttggagtcaagattctaatgtcatccgagaaaaaacacaaatgtcatctgggcagaagataatttaaaaaatagattaattaaaaataataaccacctattaatcaaagaaaaaggtcatgtattatgatctttaaaaagagttatctgatttcagattgacatctgttaactctgaggttaacatgttaaaatgtcagtgaaatgagtggataaatacctgaaatataaaagtacatgataatttttaaactagaacaggggttggcaaatcttttctgttagggggcagatagtaaatattctaggttttgtaggccaaatggtttctgttgcagtgactcaactctgctcttgtactacaaaagcagccatagagagtatttaaactaatgggcaggaatgtgtgccaataaaactttatttaaaaaacagatgagaggtcagatttagcttatgggtggtagtttgctgacctccaaagagaacatcagaggttttcaatagtacaccaataatagtggctctctgaaattgaggaaagcagatttttatctgctttgttgcttttcttataagaaggaaatgccaacatatttgcaggtattcatactttgtttgggagattaatttgtgctaagtgatgattgacataaaaggaaggaagagaaaatgaacctttgtgaaataaatggttggattctcagaaacaaggaccttttcaatgaattctattgacaatactcttggccattatgttctgggaacatatttaatacctgccttagaaattaatcttgttatattgagcttttaccatatggagttatgtgttgaatgattgtgatttataccataatatagctgaatctggacagtattcggtaatgatgcacgcaaagggcctcgaatgcattcctttacttgtgatgttattaattcattcttactcatttttcctacatatttgattgcaagataaaacttaaatggaaagtaagacaacagaaatggacattttggaaggactgttgatggaatatggttttattctgggttaagagagataaaaaaccagagaggactgagcacatgaattggaaagtgaactgctttgagtaagaacatctgtgtttggcagttttggtaagttgaagaaatcattaacctacctcttcactttgaaagtaaatgattttatacatatttaatcaaatcaaataatacatgttaacttgtacagcctcttaatatccagctgggttttctggcaaggagatgctgaaacagagttaggtcgtcaaaagattagttgggcagaaggaactaagatcagatagatggtgatgcaggtctgatggtgtctatcagcccaatagagagctctggaacaaagagggcctgttagagaagtcctgttatgggtagaagttttgtgtcatgcattgttcaatcattggcagagctgcactgagaagtgatcttcacttactgtgttactcagtgattggccaggagctagcccaagaagagtatgaccttaaaatggaggtagaccgtgatggagctgttaaccaatcccactcctttcagctaggcagtgagtcctttctcacctcacacttcttgtagctaggaatctgagcaggccatctctaggtctgacacatcgttttaactttctctctcttccttccaagtctcattggctgacttctctccctctgctttttgcattgaggttctctagaaatcagtgcttattttcctccccatcgtatagattatttctggaagatctcttccacttccatggctctaacgtgacctctcatcctctgtggggattacctataaactgatagtgatttaatgtatcatttaggattgtactttgggggataaaacataaaaccgaaatgtaaaacaagtctgggggtgctcagtccagggttggtacggaggctccacagtaattaggaatcaagggtcctcttatctttctgctctattttcctgctatatggcttccatcttcaaggtcacatcatggccaaaatggctgctggagctccagctatcacattcttgacctcagcagaagaaaaaaggaagaatgagagggcaaaaagtctacctcccatttgagttacactagttaaagtagttttcttaaaagtcccacacagcattcctacttaacattaatgaacagaacatagtcacatggctacatctagttactagggaaactgagaaacgtattttttttttttttttaacattgtagcctctgcaggagaggaaatcatgcaagaaggggtttgggatgggtattgagcatgtacatcccagtatctttcacactcccaaacctgggtttccaaatctttcttctgagttttggaaacatgtatttccctggctactagatatttccacctgtatgttacatgggcaactaatttgaacatgtgctaaactgaactccagtatattgacccacaataattacagtcttcccttttatacaattatgccgttaactacttggtcaacctacgttctcatttttatacttttctgtttccctcaatttccatactcaatcttatgaattctctcctaattatttttcgaatatatcctttcccctccattgccactttcagagtctttgttcaggacctcatgattttctgactagagaatttttattttgctttactaatctcagtcttgaacattctgatccatccttcataatgttgctgaagctatttttgcaaaacacaaatctgatcatcctgttccacagctgagagtcttacaccatctacactattaaggccaagctctttcagaaggcatctttcatgatctgacaactgcttctactttggctttatcattggccatgtcttaccatgtactctgtgtctcatccatgccatggtgaaatggccagaacacccaggcagagctaagccatgttaagacaaatctgaaattctgtctgtctcacctatctgtactataccccctactttggagctcttggaactcatgtccttctaacaaagctcagcggagttcttcatcctaatgaaaatgacaaaaggcttcttgatgttaggcgaaaactgatgagttggatttgcatatgttgcattaagctgatggtatgaaatccaggtggaaacatctggtgccctgagagtctagggggtggggaagtttgcaaataaagattttcataaggtcagcatagacctcacaatatattctgtgaaaatggatgaggcagaaagtttcagaggaatgcttcaatgtatttggttgcaaataatacaaacatagccaatagttccctacttatatctatacctgttgccattccagtatgtgtgtagttgtaatattgacttggcagttccagatgtcaggacacagcactggcttctgtattcttcttgaccttttctcatggtggcaggatgatgcagctcaatgctttatgtttttaatgtgggaatatcccaagaagaaagggaagggaaggaagaaatgttttttctcattatgtgccttttatagggagtcaaatatttcccaagaccctcttggaggtcttccttttaccattgatcagaaatgggccatgtgcctgcccttacatcaatcgctgccaaagggggagagtttcccatgattggggctgatcagttgttgatagatggtgagaatggcaactgaaagtgcctgccacagagttcaccaagacttaggattgaaccacagttttaaaagaaagaacatgaggctaaggtcagaatgtgatcaacaatgtcacatgtagcaaagatgtcaagacaaatgaggactgaagaaagactgagaagtgacaatgaagaaattgttcttgaactctaacagcaattatttcagttgagtgattaggctgaaagcagaaggtcagggagctatggagcaatccaacagtgtggaaacacaggtagaacatatggggcgatgtttttagttttctgagagtgaaaagaaggtgagtgaaagggtaagatagctagaggtgggaggggactgcaaataaagtgagaaatgagagtttttttttcaaagcagggaaacctggtgatatgatttggctgtgtccccacccaaatttcatcttgaattgtagttcccataatccccacatgttgtgggagggactaggtggagataattgaatcatgggggcggttacctccatgctgttcttgtgatagtgagttgtcatgagatctgaagtttttataaggggattttcccccttttgcttggcacttctcgctgctgccatgtgaagaaggatgtgtttgcttccccttccgccatgattgtaagtttcctgagggctccccagccatactgaattgtgagccaattaaacctttttcaatctcaggtatgtccttaaagcaacatgataatggactcatacatttggctatgtttaaaggtagggggtaaggaatcagtggagaaaaagagatagaaaggatgtaagaggaatggagaaaagtggatatgctaggtactatgggggatagaaaagaggaagacaggcatataattcaaggctggagggaaggatggaaaaaggtaggtttgcctgtattttgagaggatgacaaaagaaatacagaggcttaaaatagcatttagagaatcaggaggcctggtcatctatggaatttattaagaagtaaaagaggagaggagaggtagaagaaaagaataggttagaaaagtgacagattaaaatgagaggagaagatctataaaatcaaaaatggggaaaattctccaagtttagaacaggaactagaaaaagtaaacaaaccccaaacaaaaacacaagtcctgggaaattaaatttaatgaccaaagagaaaggaagccagaaacctataaatttccgtgagaagggaagggttacagatgaagagaaatttgacatggaaaatccatttttggcttttcccaacctcatgctgtttgtgaaataaatgatgtttctcaagccttaaatgtttcaatttcctgagttgaaagatgccatgttactgttatactatttataaagttataaagtaaggctttgtttgctcaatcttactcaggatgagaaaatggaaaataagcctctgggatagaattcaagtcagttaaattgagacacctatagcatatgcgtaatatgtatgagatgttaggtttgagatgacctaaaaaacagcatcctcccaacctgcctcaattggaatgtgttgaaaaatagacataagaatcaaacagatgtagataaaaatatcccttttgttactcataaagctctatatcatagggcatagcttagatctagccaagaggcttgcatgcactaccctgagtcaaatttatatcagtcccccaaactggaggcctttcatgcaggaataatcctgtcccaattagggacatctcagtatatcctcatttgttctttctggatggccaagaacaaatgaggatatactgagaaagcaggtttcctataggtggctggattttcaaagagagattgggggggtgctaagttaagcaaactcaaatcctttcgccaaactcatgaatcagataagtcacctcttcttctctgggcagagtcattgaggaaggcagggagagtcctgcagtctagctctaactgacgtccttcccatggcttgcaggcagatgaagtttcctccacaaaataaggaattgtattagggacaagggcacaggatatataaagataaagaacatggccaggcacggtggctcatgtctgtaatcctagcactttgggaggctgagacaggaggatcacctgaggtcaggagtttgagaccagcctggctagcatggtgaaatcccgtctctactaaaaatatgaaaattagccaggcatggtggtgggcgcctgtaatcccagctacttgggaggctgaggcagaagaattgcttgaacccaggaggcagaggttgcagtgagtgagatgacatcactgcactctagcctgggccacaaaatgagattctgtcaaaaaaagaaaaaaaaaaaaaaaaaaagaacatgcccatgcctgaagagccaaggaacttataagctagcatgaaagagaggaaatggcatgaatagcaatacagacatacaaacattagggcaggtggtagtcagtgaagggtgagggaaattgaagaaactgaagttgtaagggactggaacgtgaagaccttcacaagatttaccagggaatttggtctttattagacaagcaataggaaaccatgggaggtttctgagcaggggagtgagaaactgagtatcagaaagcagtgtgtaggatgggttagaatggaggaagggcttgaggcaagaggaaatgaagacctgaataaggcagtattcaagagaaatgttggagatggaaaccatggaagattggatatgagatatcaaaggacatgggagagttaaaggacattccaagacaatgagtttgttttaggatatatggagtttggtaggttggaaatatctgtgccttttttttttttttttttttttttcaagactgttagaagcaaacaaagaaacccacatagacaagaacaaatacataagcatttactatggggtgagccctgtcctagggtatagagatagcagcaaagaggtccaacctggtcctggtcctcatacagcttacaagtgatccaaactgttctcatttgtgagtggcagggcctcaactctcatccatgcagtgtcctagatacttaggaaatatctccaaggggatgggcccagaaacaaatctctctcctgcattcaccacattgcatatgttccacccatactctctgcctccagcttccctttgttctattcccattgcccgaaaaaccagtgctcacgagatgatcaatgtcacatgcaagggtgcgactcaggttagggcttcctgtatactttgtgttatgccttgtctcctgcactcatcaagtttctcttctattgtccagagtttcacagcagctgtcatggcttgtctctaatgtcttcactccatattctggagcttcaagggatctggtgaagtggatggtgcacagacattatttcattcccattcatgtgtcctttatcacttctttcagtccattccctaattgtgtgtgtgtgtgtgtgtgtgtgtgtgtgagagagagagagagagaaagaaagagagaggtgtgatctacactagcagctgacagctccaaacactttgttacttaagcaactgcaacaaagtacaatgattgtttagtgagggaaggtaaagagcattacaagggtagattgtactggtgataagagtctagagcagagattctaaacttttggggttcacagaggccttcgtgttttagcaattcttttagagtgccccatggcaaaataaatacctaagagttccatttattaagtagttaagtcctgatattttaataaattttcatgtcctaacaacttagtagctgcttaaaaagatacacagggcatactgtagaatgaaaacatattttattcttaaagaccatggttacttcctagtaacacgtgcatgcctgttgggcactgcacagcttctcgaaccttggaagcagattggacgttgccaccctcgtttcttttttcacgttgaattcatgtggtacttgcttcttagatcacatctgccaccccaaagccaacttcaccaaaatatgacaccatcaaagggaatgtagtgacttcatgtggaaactgttaagtacctctgactaggaattctcccagtgttcagcagatgccagccatcgttgtgtttcccttgaaaatttaaaatatcccagaatgctccatgtgagtttaaaacaatgccctggggcaccttaatatgttgggatgggtggtcaaggaaggcctttggagtgaaagaatatttgaatcaagatgttaccaatgagaaaggatagttcaggcaaaagagtgcctgtaagagccttcttaacagggcaatagcatttatgaagaagtcttctttgtgaaggaatgtggtgagtttgaacagtgtatctgcatttctagagcacttatcactatctgattttatatttctatatatctagaaatctatatcaatatgtaccatatatacatttatgaatattacaaacaacatatactatatattctatgtgtctgtattataaattaatctattcacctatcattctattatctatctgtctatctatctatctacctatctacctacctatctatgaagacacacacatgcaatcatttccttgctgttgcaggggataagaaagggagttcactgggcatgagtcacatggtgtcttgcccaggctgtgaagcctggatttgtagcagaatgaatgagcatggttttagaatttcctccagcaatgtttgacaatccaggagcagaaacaaagaaaatggatggttggcttgattcggggtcaggaattggcaaaatagatgtggcagaaaatcaagaggtttgaagctgtgaagatttggaatgttcattgccttcacctccaagcatgatttacacgatggcttgggggagctgttattggcagggaggcctttgtggctcgccagttgcctgtcttccccatggctgcccaaggtcacctacagatccgaggttgcaactgctccttctgactttatgtcagcgtgggaagtgtggcctcactctggacaaagacttccaggtccctgggatttatctcactccttcaaaggatcacactagcagatttgtctgaaagcaacagcatgaaaaataagcttttccttgacttgccagttttggtttaaagcaccaacaacttgacaaagcttacttccaaatgctttatttttttgtccatatacatatatttttacatattatggtaagcagcttctaaaagggctctcagtggcctctgcctcctggttttcatgccctcatggaataaaagtgtgagctgaacctagtgacttatatctaatgaatagaataacggcaaaagtaatggtgtgtcacttcagagattaagttacaaaaaactgtgacttttctcttatttgccctctcttgctccctcacttactcatttacataaagccatctgctgtgtgtgacctgccctctgcagaaggccatggagcaaagaaacaatggtcacttctggccaacagccagtgaggaactgaagctgtcaatccaacaaaccagaaagaactgaatcctgccaacaaccagtgagctgggaaatagactcttccccagtcaagtcttgggatgacccccagccccaagtaacacctccatagcagcgtgtgactgattctagggcagagtctaagttgtgcctgaattcttgaccaacaaacaatgtaaataattaatggtgttttaatcctttaagtcgtgggataatttgttacatagcaatagataatgaatacacaaacgtcacaaactgtaagatgccattaatggtaagataccttttattttatgttccccaaataagaaacactcctgccaatatgatctgccaatatgatctgtcataagatggatagcgcactgttgattttaatacatagcataatttcagagatgtgtgaacaaaatgtgcatcttacaatcagtgacactatggtagttgtaatcatcacatacacaaattttatataatgtattttttcctaatttttttttttttgagacagggtctcactctgtcaccaggttggagttcagtggcttaattatggctcactgcaacctctgcctcccacgctcaagtcattctcccatctcagccttctgagtagctgggactacaggtgctcaccaccatgcctggctaatttttgtatttttttgcagagacagggtttcaccatgttgcccaggctggttttgaactcctgagctgaagcgatccacccgcctcggccttccaaggtgctagtataacaggcatgagccaccgcgccaggctcctggatgttttatcgtggacatagtccaaggttgtatgccatctttatcccatccatttttctgtgtgtgtgatttttttttttttttttagtagagacggggtttcaccatgttagccaggatggtctcaatctcctgacctcgtgatctgcccgcctcagcctcccaaagtgctgggattacaggcgtgagccaccgcgcctggcccccaatccatgacaaaaaacttcgaatagtacatgtccatgtattatttctaccagtttttatatacttccgggaatagtctgcgcacactcaagcatctctcttcccttgttttctcttctctttgttttttctcttttaacacacttggtagcacactaagtgcattgttctgcaccttgcgcttttcagtgagcaatgtgtcttggtaatagtttcataatactttgtaaagatcctcttcaatattgaggctgagaagtctgactttagcatttcctccaccattttttccctctaaattattattattattttttttttgcgacagagtcttgctctgtcgcccaggctggagttccgtggcgcaatcttggctcactgcaacctccacctcctggattcaagcaattctcttgcctcagcctcctgagtagctgggattacaggcatgtgccatcacacctggctaatttttgtatttttagtagagacggggtttcaccatgttggtcaggttggtctcaaactcctgacctcgtgatccacccacctcagcctcccaaagtgctgggattacaggcatgagccaccacgcttggcctctaagatctttttaagatcttttatttattcatgatttgtaaagttctgtgataatttagctctatttttccttctgatgctggcttccttgtatattctttcagtctacaggctgctagcttttactcctgtatgtatgtgtataaatgtgtgtgtgtgtgtgtgtgtgtgtgtgtgtgtgtgtgtgtgtatttttctttacctgttttctgtttgtctggaacggaaacttctattcctgttatttgactgttaggttttctgggttaatcctttctctcatgtcttgcttttgcccataatttttatttcctgatctctatttgctatctttgtgggaaggaaactgggatgaactttatattcatggaaagataaagttccatagaaatttttactttgcgtgctctagctttatttattaagagctcttctttcctcactgattaataaattcttgttttatggatacattatcttctcatatctttccaaggatgttatgttaaggttgttttatggatgcattatcttctcatatctctccaaggatgacatttagcacaaatcccttcctttcctttccctttctctttctctttctctttctctctctttctttctttcttttctccctttctggctctgtctttctctttcttcctccctttgtctctcctttttaaaaaattaacccaaactttggcatattgagaaataatgtgggaaaagaggtaaggcagatgaaagaccaagaaaccacttttattaaacaattgaagagtcaggtagaggatgcagtttagtctaagagtccagtgggcctgcaaactcaaccccagaactgggaaacttaggcagccaatcacgggcaatgctgaactgggacaggactcctcccatggtacgactgttctcactgaggggtagaaaaaaacatgctctgtcttggaaagactcactcccaggaggaaagggtggagctgaactaagtctgaccggttctttctcccagactcacctttactgccctgtgggagaggctagtgggagggtgggcaaggccagagcgtgtcctgcctccatgtggagggagatacgggaagctggtaagtctccctgccaacctctccttggggtggagggtcagttcctggtttctggcactctgtgtgtgggagtaggtgaaggtgctgactgttataaatactgaattccatcttagcctccagggttgctcttgtgtccccctcctacactctgtgatatcagatgtccccagcttatgagtttctctgactctctgtggtggggagaggcaggtctattctcagccctctgcttttattcacagctttctctgccctgctaaagaagttactccctctgccctgtttctccttcctcaaaactgtttatctttcccattcaggacatctcttgtcctgatgtctctgtttgtgagaatttatgtatttttttctcctttactgtggaaagagatgcattaaagcacaagctttagattcttacacttgctttgccgcatactaactatgtgactttggacaagttatttaacctctctttgccttagattcttcaattgtaaaatggattgttataaggttggaaagtgacaacacatgtaaagtgcccagattaacgtctggcacccagagaacattcaataaatattagtcatcatcattaccatctcagcatcttcttagtggagttttgggaagggtaggatgtaaatatgagtgttctattaatatcgccatctttctacatcaacttgtccaacctgcagcccacaggccacatgtggcccaggatggctttgaatgcagcccaacacaaaattcataaacattcttaaaacattacgagatttgtgcatggacttttttttttttttttcagtagctcatcaagtaatgttagtgttagtgtagtttatgtgtagtccaagacaattcttcttcttccaatgtggcccagggaagccaaaagattgaacatccctgtatctacatggtcttcgtagcttttgtttttattggtactttctccacactgtaatttccatggaggaaaggtctatctttttttttattctgtattatatctatagcacttggcaaacacatgacctatggtatgtactcagacaatatttgtggggtgaatcaatgaaaacaaattcgctcataacatttcttgtaggagacaatattgtatggtaatcaaaaacatgggcttttaaatgacactgtttgggtttgaactatggctgggtcattcactgatagtgcaaccttgaacactttcttaatttctctacccttcaatgtccccacctgtaaactgaggataaaaattgtacctacctcataagggtaatatgaggactaacagcaataaactgtgaagcatttagcatcatgactggcacatagtaattgctcaatgaacattagcttcgatcattggtggtgcttttgtaattgtttattgcctatatgccagtcactgggttaggcacaagtatatacatcacttactgaggccctatgatttgctgtatactgtatttaatagcgtacacagtagtacttccttttcttttcttgttttttgagacagagtctcgctctattacccaggtgggagtgcagtggtgtgatctctgctcactgcaatccctccctgcctcctgggcttaagctgtcctcctatgtcagccctctgggtagctgagaccacaggcacacatcactatgcctggctagtttttgtatttttttgtagagacagggtttcatcatgttgcccaggctgatctcgaactcctgagcgtatgtgatccacccgcttcggcctcctaaagtgccgggattacaggcatgagccacagcgcccggcttgtagtagtttctatagtcagatactgcgtgtggtttctatagtcagtggatttgaattcaaccctgctattcagacctcagctgaataacttagaacaaattagttaatcttattgagcctcactattaatatttgtagaatagggtaatgataaacctacctatagggtagttatgaggcaaaccatgtaaagcccttagcacagagcttagcacatagtacatgctcagtaaatattagctatgatgatgatgatgttgacaacaacaattatggtggcagtgacaatgataaaaccatggtaattatagtggtgacaggaatgatagtggtgacaacagcgatggttgtgtctgtgacaatgttgataagggtgtcagtgatgccggcaatgaggataaccatactgacctgagaggcaggaacatgcaggagttatgtgctttggttgtagagtcagaggaacctggagccaagtatctgttctgtcttaactagatgtgtgactttaaggaagcaattttatctaattaaattttggcatcctcttctgtaaaaacaatcattgtttcgcagggctgttgggaagtttaaaaaaatgttatatatcattccttaaagatgcctatttttcatattttaacatctctgaaattagaaatgcatcttgcagttactgtcagccaggcagaactaaatttgttttaatttttaatttttgtgggtacatggtaggcatctatatttgtgggatgcatgagatactttgatataggcatgcaatgtgaacattcagactgaatttttctttctcttatattctctttctcatgaagacacaagagtaattctatgacagtcactaaatataagtacaaaagtcttctcaataagtagaaaataaaacctcaaactgataaactgtgttataacttaactgacagtgttttatttactttttaaaggtacaaaaaataacagtttgtccttcaggtgatagaattttagttttgatgaaaaatagtaacacgttttgaacaccacacagtgtaatagttacctctttcatctggttttgtcccattttgctgtaataagatttacacaaactaagaaaaatatatacctatagtagccagtcttcagagggtcccttgtgatctctgccttctggttctcacacccttgtgtaatccccttccactctgagcagggatgatttgtgtctggtattgcagagaagacagagtgtgacttctgaggcctggcatccaaacattgctgcatcccttttactcttttttttttttttgagatggagtttcactcttgttgcccaggttggaatgcattggcatgatctcggctcatggcaacctctgcctcctgggttcaagcgattctcctgcctcggcctcccgagtagctgcgattacaggcatgcgccaccacacccgctaattttgtatttttagtagagattggtttctctatgttggtcaggctggtctcgaactcaggtgatccacccgcctcagcctcccaaagtgatgggattacaggcgtgagccaccgcgcctggcctctcttactctttaaatccctcactctgggaaaaccagccactgtgtcatgaagacactcaagcagtcccaagcaggaggtacacatggtgaggaattgagtcctcttgccaacagccagtgaggatgtaaggcgtcctgccgacagccatgggagtgagccgccttagaagtgggcattccggtccctgcctccccaccctccactgacatcctggttgtaattttatgagagacactgcttccgagccattctagctgtcaccaaaccctgactcgctaatcacacattctatgcatgtaacaaaatatcacacgtaccccataaatccataaaatattgtatatcagtaaaaaagtattgttaacatgaaactgtggttacttctccaagatgaatacatgcttcaccaaatgagattttattttttaagtgaaggaatccagttaaaagcaaaaagaggttaagaaaaacaagataggccaggtgctgtggctcactcctgtaatcccagcactttgggaggctgaggtgggtggatcccaagatcaggagttcaagaccagcctggccaacatggttaaaccctgtctctactaaaaatacaaaaaaaattaaccaggcgtaatggcgtgtgcctgtagtctcagctacttgggaggttgaggcaggagaatcgcttgaacccgggaggcagaggttgcagtgagctgagattcactgaactccagcctgggtgacagagtgagactccatctcaaaaaaaaagaaaaaaaaaaaataaatccagaggtctgatgaatacccaaaagtcggctgtggaggtccctctgcatacgaagggtaggaccccaatggttgtgtttcactctgtgtgtgtgtgtgtgtgtgtgtgtgtgtgtgttttcaaagttggcaattatggagtctttccactgattcaaactaataaatcaccatctctcagtacaaacttgatttggagttaaaagtcatgtcaatcatgtatatcgtattaaaatgtaataaaagtgaacactgaaatttttacaaataacaccatgaaggaaaattcggctgaagacattatagctaatttgtaaaaggataattaggaatattcaagaaacatagggatgtgaatgttcaaaattattagtatctggaagtaataaattgtaacttttttttcacccaccagattagttaagaacaaaagaaatgtgatgtgtcaaagtgaggagagagactgtggatgggaatgtaaatacatggttcaatttttcttttacaaaagacttgtaatcaaagttatacatgtacagagcttttaaaaagtccagtggtaccatgaggaataatataaaagatagtaatctcctgccccaccccttctcacactagatcctgttccctggagccaactgttgtccactcttttagcaagttctttcgctatttgcttttttttttttttttgagacggcattttgctcttgttgcccaggctggagtgcagtggagtgatcttggctcactgtgacttctacctcctgggttctagcgattctcctgcctcagcttcccaagtagctgggattacaggcatgtgccaccacgcccagctaattttgatttttagtagagacagggtttcaccatgttggccaggctggtcttgaactcctgacctcaggtgatccacccgctcaacctcccaaagtgctgggattacaggcgtgagccaccacgcccggcctgctttcatatcttaaaataatatgcttaaggaactctttctcgatttttggttttatgtattactattgacatcttactagaaaacaagaggctctacctctgtcttagtttttgttccccacaatagtcgagttgccaataaaatgtaggatgctcatttaaatttgaatttcagttgaacaacaaatcattttttatacaagtatgtcccaagtatagcatgggcaaacttgtatgaaaacatgatttgtcatttatctgaaattcaaatttagtggggcgttttgtatttttatttgctaaatctggcaaccttgcgtgaaggagacacagagataaagacagtacatgatatggtttggctatgtccctacccaaatctcatcttgaattatagctcccataattcccatgtgttgtgggagggactcagtgagagacaattgaatcatggggtggtttccctcatactgttctcatggtagtgagtaagtctcatgagatctgatggttttataagcagaaacccctttcgcttgggcctcattctctcttgccatataagaagtgccttttgccttccaccatgatcgtgaggcctccacagccatgtggaactgtgaaaaagaactctttttctttttttttggagacagagtttcactcttgtcacccaggctgcagtgcaatggtgtaatctcagctcactgcaacctccaactcctgggttcaggcgattctcctgctccagtttcccgagtagctgggattacaggcacacaccaccacacccagctgatttttgtaattttagtagagacgggggtttcaccatgttggccagcctggtctcgaactcctgacttcaggtgatcttcccgtctcggcctcccaaagttgtgggactactggcctgagctaccgtgcccacccacctctttttctttatagattacccagtctcggatatgtctttatcagcagcgtgaagatggactaatacagtacacaatttaatcaaaaggcactccgaggaagcacaagcaagaatgaagggagaacgagagaatgaagagagaatagtcaacgaagggtccatttagtgagtggattgtcactgtggacgatctgagctcagtcatgctgggagccctttgagagactatggagcatacctcagaattgtcccgctagagggcaggagggtggagataccagtgcactggctgcagtccctccttggttaagggtggtcctcacatgtctgggttgccctcgtgctgtagccacgcatttttatttctcccacctcccattcttgggtaaatcaacatcgtatatttacactacaatgattatatagctgtgattcaccactgagctgcaattgcgtgtctcacacaactttttgtattcttgggcttaataattgcttcctccattattcgctttaggtttccattgcatccattactaattcaatccttaactttctaagtgaatggataatctgagaatacatttgacagctcaggtactccctcaatttcatcatcttttcttgacaccctctcactctgatccttgttctgcttttctcatctggtctggttgctttctaggcctacaggtcttaagatgtctctttactgccattcctgaaaaatcctgtaactcctgttctgggttggatctctgtttctcaaatcacaagcccttactttctgggtgtactttcttattttgatggagaatattctccaagaacctcctgatatggttaggctttgtgtccccacctaagtctcatcttgagttgtaatctgcataatccccacgtgttaagggagagaccaggtggaagtaattgaatcatggcgggggcggggagggggaagggggattgggggaggtgggggagaagggcggtttcccccatgctgttctcatgatagtgagtgaggtcttatgagatctaatggttttataaggggctcttccctctttgctcggcacttctcctttctgtcaccttgtgaagaaggtgccttgcttcctctttgccttctgccatgattgtaagtttcctgaggcctccccagccatgcctgaactgtgagtcaattaaacctctttcctttgtaaattacccagtttcaggcagttcttttaagcagtatgaaaacagactaatacacctcccaagaaagaattcatgagaagtaaatttttgtattcttgcatgtctgcaaatatctttattcaaataaagaacatcgtggctgaatatcaaattacattgggcattattttctccagaattttgaaggttctgctcattgttcaattccaatagcattctgaagccttgttcattccatttgatctgctcttttctctttgttctgaactttgttgttgttgttgttgaatttcatcgttatgtgccttgtgggtcttttccccgctatttattgtgctgaacacttgatgaaaacttccagtctggaaaatcacggccttcactccttgtgttatttctttgcaaatttcttcccttctgttttccatgtactctttttcttgtaacatttcttcttttcttccttcttttttccctttttttggatgtagaatttcttgaatagaccctttagtttttctatcttttttctcttattttccttattttatctttgagttttacttgttggtagattttttcaactctatttcatttcaaacattctatcaaattaaaaatttctacaattattcttttaatttccaagagctgtttcttattctcttattatctctttttatagaccatcattgtataataatataactatttctctgaggatatttattatagttaaaaaagtcattttgccatctgcattgtctttatttccatgaaattttttctcttagtttgtttcccaccctgccccctgaccctcaacgtttttttttttttttttgacattcaaagcttggaagagagctgggacccaactttgtaacataccaattcaaagcaatgcaaaactacgtaaaagctgacgtcaatgtctaactcttctaggctgttcatttatacttaccagagagacactaaaatgcaaactctacactggtgggtaattgacaaaagcctgtcaatttggaacttcactgtcaagtgatcaagtagtaacctggcatttcactgggagactttcagatatcagtgtctgtaggatttttctcctggactaatcagtttccttaaaaaggaatcctataagacccttcctgtggtctaagtctagctgctaatgttcttgaagccaagtggagatagggctggtacccccaaaactggatttagacttcaagtaaaagaatgttttgcctcccaggctggagtgcagtggtgcagtcttggctcactgcagcctggacttcccaggcttaactgatcctcctgcttcagcctcccgagtagccgggaccaccaccaccatttgtagagatgggggttttgctgtattgctcaggctggtcatgaactcctgggctcatgtgatctttctccccagctccacaaagtgccaggattacaggtgtgagccaccatgcctggcctaatacactctttaatacaataataccttgtagatctctttccatttccaataaatatagatcatcattgggaatgaatacaaagtattcttctatatagatctgccttattttgcttattaatctcatattaatggactttcaagtgatttctagtttttctctattgtacagcacgcagtaatgaacatccttgtgtaattcctagaattgtgactgcttgtggaaaggtatgcttatttacatgttgatacctgttgccaaccatcctctagaggtcttgcccaccagtgtttcatttttagatagtaaaatccatttctcttgactatttgatttctttgattacttcaagccttaggaattttttttttaaacctagcatagctttatgtcatttttctataatttgattaaaaagacaaaaactataatccaagtgaagcacagaggctttcgacttcctgattttattagaaatcaagtgacaaatcttttctttagggctgaagagatcttttcttcctttctttaggtgaggaagggttgatttttataaatatttgtttatttattattcttatttctatgagtcattcaggacttattcttgtgcaaaatgtgaaagaaagcacacagaaaacaataaataaaatagtgcatctgccaattcaaccacctctctgttgtcaaattcatccttatccccaagggtagtctgagtttatcacttttgtgggtaaccttccattgactttcttttgcatttacatatagagcatgcacaaacagaaatacatagatctgttgtgtgtgttttttaatctaaaagtgatcatgcacacatattctgcagagtgctttttccaacccataatatgactttgtattagtccattttcactctgctgataaagacatacctgagactgggtaatgtataaagaaaaagaggtttaatggactcatagttccacaaggctgaggaagcctcacaatcatggtagaaagcgaaaggcacatcttacatggtggcagacaagaaataatgagagagccaagcaaaaggggaaatcccttataaaatcatcagatctcgtgagacttattcactaccatgagactagtataggggaaactgcccccataattcaattatcttccactgggtccctctcacaaatgtgagaattatgggagctataattcgagatgagatttgggtggggacgcagcccaactgtatcaggcttggaggcctctctctccatgtcagtttccctaagcttacctcattccttttacttatttatttatttttgagatggagtctggctctgtcacccaggttggagtgcagtggcacgatctcggctcactgcaacctctgcctcctgggttcaagcgattctccttcctcagcctcccaagtagttgggattacaggtctgtgccatcacacctggctaatttttgtatttttagtagagaccaggtttcatcatgttggccaggctggtcttgaactcctgacttcaagtgatccgcccacctcagcctcccaaagtgctgggattacaggcatgcataatatagatgcactatagtttattgaactatttccaaatgatggacatttaggttgttttccctgttaaaaatgatgatatagtcagcaacaaatgactttgtttcttccagggactctttctctgagacaaataatggaagtggaattgtcagaggcatgtgaaccatagcaactccatcttaaataggagctgggtaaaatgaggctgaaacctactgggctgcattcccagacagttaaggcattctaagtcacaggatgagataggaggtcagtgcaaaatacaggtcataaaaactttgctgataacacaggttgcagtaaagaagctggccaaaactcaccaaaaccaaaatggtgacaagagtgacctctggtcatcctcactactacatgcccaccagtcctatgacagtttacacatgccatggcaacatcaggaagttaccctatatggtctaaaaaggggaggcatgaataatccaccccttgtttagcatctcatcaagaaataaccacaaaaatgggcaaccagcagcccttggggctgctctgtctatggagtagccattcttttattcctttactttcttaataaacttgctttcactttgcactgcagacttgctctgaattctttcttgcgggagatccaagaaccctctcttggggtctggatcgggacccctttcctgtaacggaactgctgggtcaaaggaggagtatatttgaattatcgttgcatttagagcagtgtttctcaaccgttttttctgttattatcctccccccagaaaaaattaaattgaaattattaaattaaagtaaaatgacaagctaatttaattgtaaattaagttaattaaattacattaaatttctccctgatacgagaaattaaatactaaagaataagattttgttgagtagggttgtaatattgccccctttgagaatgcatgattcggataaacacaagttgaaaactttttgtttggcgagtctatggaatagacacatccctctgttgtaagggttgtaagatccaactcttgaaacctgtgcagcctctagtaattgtagcttgtctggagcccttcaaaaatatttactaaatggaactgaatgttgataacacaacgtcttagaacattatcatacccgccataaagcagagcagatagactgggttaatttattctccttccttttacattaattaacattgtcaagaatcactagaatgtcacttgataattcacagagaaaaaacatggagaagaaataattgggccggaggctgtcactcgtgagagcttgcttaggcattccttttgcagaagctgtgcatcattgaggagcagggaacctggcccatgaggctcattgtttgacatatgctctgtgaaaagtagggtggcaggaaaacctaagctgttgcatttgctatgtgagaaaaaacttgatggccccgaaagaaactggcccccctgatgtgggaaaactgcaaaaggaaaggcatgacatttagaaatcatttctttagctctgtcgtatgaatccagtgatcatattagatgtgaaaggaaggggactttcaatcattacaggaacaagacaaaagtcaccaagcagagagaataggaataggggcacagacacagctgttgtctcagtgctgttgggagaataaggatgcttttgccgtctctactgcagaaaagctgtggtctaatctttctgccttgcactggctgtgttgcttggacaaattgcttggtggctctggtcctcagctgggctgcatgagctggaagcaaaggttttgctcaaatcacttgagtggagagatttgatgtcaaaacatttggaattacagctgagagctaataaaatgctaatgtaggaatgaaaagacttcctggagttctaagtaacatttttatgtatgtgtgaacattttaattttcatatttatggtttcactttaaagtgaattagaaaaaaatcacattaaactactgacttcatagataatatttattgctttggatgtgtctcttaagaaacaaaattcattgtaaattgacttaaataaaaataacacataagggttgtatatggatatggttaaaaaaagactgaaggagttttggaatgaatacggtttgggaaacagtgactatgccatttttttttccccctagaattggctccatgccccaccacttagcatagactggtcagaagcagttaaaatcattccttgtgttttctgtagctgagaaggaagaacatggaagaactctccaagatggtttcagcacttttgttaggaatccaaaacataagacattttctcttaaaaatactaatagctaacttttattgagggctccttgtgccaggcactattctaaatattttatgtattttctttcatctaatcctcatgacaaccctgggaactaaattccagtattaccctttttttttttttttttttttgagatagggtctcattctgtcacccaggctggagtgcagtgccgcaattttggctcactgcaacctctacctcccaggttcaagcgattctcctgtctcagccttctgagtagctgggactataggtgcacgccaccacgcccagctaatttttgtatttttagtagagatggggttttaccatgttggccaggctggtcttgaactcctgacctcgagcgatcctcccaccttggcctcccaaagtgctgagattacaggcgtgagccaccacacctggctagtattatcatttttgtctccatttcacagattaggaaattgaggtccagagagcctgttgcttaaggctccagagctgataaagtagctaggctttgaactcaggcagactaattccagggcctgtcattttctccatgccattcttatgattgcaagacctcccagaatgaggaatccttcctgctggaacagctaggagtctcgatttttccggaagcttgaggctggcttcctagacaagtgcttctcacactttaatgagctttccaaatcaccaagggatcttgtgtgaaaaccaggattaaggagatgtgggttgggaccagagatccagcatttctaacaagctcccaggcaatgctgctcctgatgatccctggagtgtgctttgaatagaaaggtcaagagcctcttatttttatggaatgcacctctcttgctttttattcccctgccctgtctccaaggcatcaactgagttcagggtgcacatgaagttggatacaaacccacgttgttgagaccggacatttggcgattagattcagcacagatgtgtcctcagatttctccctttctttgttggctacaaagggagcatatctaactcctctcaaagagaaaagcaaccaatggcatcatgtccatagggcaaaggcttagctctccctttttagggaaacaagattcctaatacattgagagagcgttcagtgttagtcttgagccttgggctgcaaacctgtttttttaactttatgtaacatcttggctctttttccaaaaagaagtgtttcaaaattgtttgacgtccctgctctgggatgtctacaaagagacaaattgtcctttcatatgagttgacctggcaatgaagcatggcctgtcccttttgctgtccagaaatctcccaaacttgtggccggtaacctcttcctttctatcctttccgaagattccctttggatggaagtcagctgtgaatgctctcctgatttgcattcaattgtataaattgtcataggtacgactctttgttcagaagcttgagtgtatgagaaaaacaacttataatgtatttttgaaattcaatctaatttatatttcaatctcctatttctctagggcggaaaaatgtaatctcagttaatttgaggtttcttcctgccctggcattgtatttaaattcaggggaactggatgtctcatgggtttttctactttttaatataatctggttatatgggcattgggtaagatatctgccgcctgatttgatccttcctcattggcccaagcatgtcaccacggagacttccttgttcgtgtctatatggttcatacatggccttccccttaattaaagatgtcttccgaggaacattttgtctaaggtaagaatcctttccagactcctaacatcataggcttttaaaacattggagccaggaaaaatattgtttgtttctctgcttccttctttaagctcaaccttatgccctaaccaataaacataaattagctttgctgttaaaaatggagaaaaggccaaaaaagagataccatagatacatatttaaaaaatatcactttgctacaaaatctaatgtcccagatgaattgccatgcaatttgtgcagatctatgtacgtttctattctttttccatgctgcacctgtttaaatgatagatcattctcctaaatgctcttccttgtacttgtccttctctgctatggttcactcagcctctggcaaagaagtatggaactgggagaggtggaagattcggagctagaggagaaggaaggaggataatgaagcacacctgagaactttgctgcatcgtggttttgaaagtgtggcttttactgttgcccatcatatgcaactgagttcagagggcacataaagttggatacaaaccactttggtgaaccagacatttggcgattagatccagcgcagatgcatctatatgcaagtttttagtgagatgagacatagtaatggtgattaactcgattgttgatataatactggtggtaagctcattttaatgtgtagtttattggagttgttaaggacattattttcagagtaagaaagccacatttgattcctggctttggcacttccacatagttgacttgggcaagctactaaaccttcccaattattgcaatgggaataacagtggtgtctatatggtaggattgctgtaagatttgaataaggtgatgtaatgcacactaagagctaagtataatgagtgcctggctcatggcaagcagaatgaatgttaacttataataacaatcatataaaaagagtcaattttctgaaaatttcctcattttagttatctttaagtaggtcttttctttgtccttatttctgagcatggaaaaaaccccagaggcaaagaccattagtcaactgatcttaaggaccagcagacaaagcttctgatgtaaatttgccatcattcccttcacctcagaagttatgtctctaacatatcttatgttgagtgtgctgacttagcaaacctgatgccctagttttaatacacaagacttgcagcatgaccaccaggaaaatgtttccaaatgcttgttgtggaaagagtagttagtctgcacctgtcaacatcgcaactggattcgtctcaaaatgcaagacacatggttcggaagctggcaaaggaaaggatattttcaccctaaaaacacagctcatttccattaattgagtctgaatagtcacaagttgcaaagctccagacaggttttcacaagcccaagagcagggactgacaatatttacagcgctctaagctgaatcgtattactaggaagttcataaacatggaggatgcctgctctgctgtcacttgtgtgatatctgggcttctgctatgattttctgggctcctttaatccaggacctatggttgggaatgacaaacatctaccagtttctgagttccaactcatgttggttgctattatgccacccaggtcactctcttgggaggtctccatggagctcctctttccatctctagacactctctcaatccttgcatgtttctctcatcctttctctcagctttgcttttttcccatctagtttcctcttcaacaaaacaaaataaacatcacagaaatgaaccgatgtcatccagtttggcagaagttttgtctttatggggtattataatatttacctctttccaaacttcttgatattgaagtttcctctgacttctgtaggttcctctcttaggactctatagagtcgggaattttagtcgttcttccacttacgtcaccagaggatgaacatatctgtttttatatgttgcacaaggatagcataagagacaaatgaagtgttgtttcacttcatgaacaacaaaagaaagataaataaagtaggaacttttgtttttaggcaatgatgtgaatgaatttaaattcatattgattatataagcaataataataacacatcgtgggatttaaaatatatttagatttaaaatgtaggctaatttaaacataaataagaatggggctgaatggagttaaagggttccaaggtctttgtctggagagtaggtaaagacaccaattaatgttctgctttgataagccaaggatgcatgttataatttccaggtagcactaaaagaatggttaatgcacgtacaactttcatgctaatagagaaaagatgtaataataaagaaatcaattcgaaacaagatgagaaaagacaaaaaaggaacaaagaacagatggaacaaatagaaaacacatgatagatggtattttatctgcttgatgacatacttactactgaattatgtccccttctcttccccaaattcatatattgaaattctaacctccaatacctaagaatgtgaccgttatttggaaatagtgcctttatagaagtaatcaaggttaaatgtgatcattaaggtaaatgtgatccaaaatgactggtctctctataagaagagaatattaggatacagagacacagagcagagatcatgtgcagacagagggaaaagatagccatttacaagtcagggagagatgcctcagaagaagccagcccagctgatgccttgatttggacttctagcctccagaactatgagaaaacaagtatgtattgtttaagctgtcaggtctgtggtattttgttgtggcagccctagcaaactaatacagcttcctagacatatcagtatttatgtcaaatgcaaatggactatatggtcaaattaaaaggctcaaattgcaatgaaagaagacccttgttggttacaagagacatatcaagaacacaagaatgtggaaagattagaataaaaaggtgaaaaaaaaagataacactatgaaaactctaaccaaaagaaatttgatgtagctatgttaagattaaaaatgctgtttttaatgcaaaaagactggtagagataaagaggaatttcataatgccagaaggatcaatttaccaagaaggtataaaaattctcaatttgtatagatccagtaatatggaatcaaaaaggcagaaatgaatagagtcacagtcatactgacagatttttatcacacttgtcagtggctgataaaataagtagatataaaacagcaataatacacaaaacttgaataatgcaatcaacaaattttacctaaggacatgtagagaatattgcagccaacaactggagaatacttactaatttcaagcacaataaaaattggctatatgctgaaacgtaaaggaagtctcaccagatttcatgatgcaaattatatagtgtttgatttctaaacacatttaataaagttgaaaatcagtaacaacaaatggtcctggagtaactaggcatctatatgcaaaaagtgaacttcaacctgtacgttgtacataagaatgaactcaaaatagattttagatctaaatgaaaaagctaacattataaaaaaattagaaaaaaaaacagaggagaaaagtcttcatgtcttcatggcctttggagaagaaaagatttcttacacagatcacaaaaaggcactaatcataaaaattagtcataataattggacttcattgaatttaaaactttgcttttcgaaagacactgttaagaatcaaagaagcaagccacagactcagatgaaatatttgcaatactcatatatgacaaatgatttgtgtccagaatgtataagtaactcttgcagctgaatggtaagaggataacaaaaactcaataaaaaatgagcaaaagatttgaatgcatacttcacaaaagatatcttaatggccaagaagcacatggaatgatgccgaacattattagtcataagataaatacaaattacaaccactaagatggtcaaaatgtaaaaggttagcagtagcctgtgttagtgaagatgcagaaaaactataaccaggctgagagtgctggctcacacctgtaatcccagcactttgggaggctgaggtgtatggatcacctgaggtcagcagttggagaccagcctgtgtatggatcacctgaggtcagcagttggagaccagcctgaccaacatggtgaaaccctgtctctactaagtacaaaaaactggcccagcatggtggcacatgcctgtaatcccaggtacttgaggctgtggcagtgctcatcacacagtttcccacacggggcaccaactgtggcagtgcacctcttatgggggcgccagctgcggggaggggtctgtccgttgcagacccctgacccggtgacggatgaataacgtacactgacacacagatattctgctttgcctgtccagctgagtgtgtctcagccgcttacagactccctgctgagtcctgtaaacagtcgtgacttggccctgatcagctagcgagactcacatttatttggtaagattaattaataaaggcttgagctaacaccattaaagggtaattgacattgtggacttcctgagtaaaaagcacttaagtacctgtggtacaataaaggttagtcttaagatcatatgagtaaacaagctagctaggtaaactactctgccttcctttgttactactttaattttgtttaactaaagataaagggaccaggccaccttcagccagatctattatagaagttatgcaaacttctcggccttccaagaagatttgtgtctatctctacactatctctaatatttttcccaccagcctgattgaaccccaaccagaggctgaggcaggagaatcacttgaacccaagaggcagaggttgcagtgagccgagattgcaccattgcactccagcctgggcaacaagagcaaaactccatctcaaaaaaaaaaagaaaagaaaaactagaacctcatttattactactgagaactgtagaactgcaaagtggttctaaagttgtagaaccactttagaaaaaattgggcgatttcttgtaaagttaacacattcactgtatgattcagaaatttcattactatgttgtatgtaagaaatgaaaacacatgtctacaaaagaattatatataaatgtttattgtagttttatttgtaataacaaaaagctggagacaattcagatattcatcaaacagtgaatggataaacaaatcgtgatatattcattcaatggaacacttcttcagcaataaaaagcaaaaagctactgatacatgcaacatcatggctatgtctcaaaatcattacgatgatgaaagagggtagagtaaataatatgtgattctatctatacaaaattgtacagcaaacaaaactagtttgcaatgacagaaagcagtttagtggttgtggttaaaggtagagttggagaactttttttggagtgaaaatgtatgttcaatatattaattgtggtcatggttacactaatgtttatgtttttcaaaactcacaaaactgtattatgtataaatgcatataatatattgtatgtaaatttgaacctaaattaaattgatttaaaaagaaaaaatcaataaaaatattaagaaatacacttctaaataaaccgtgaggcacagagtcaattataatggaaacaaaaaaaatttgaattgaatgatattaaaaatattagatgtcaaaacttcctgttaaacaagtacttagtgggaaatgccttaagtacatatattgaaaaagaaaaaaaagtgttgaaaattaattaccaaagtgatacggtttggctctgtgtccccacccaaatctcatcttgaattgtaatccccacatgtctagggagggacctggttggaggtgactggaacatgtgtgtggtttcccccatgctgtcctcatgatagtgagtgagttctcatgagatctggttgtttgataagtgtctagcacttcccccttctttttctctctctcttgccaccatgtaagacatgccttgcttccccttcttccatgattgtaagtttcctgagacctcctcagccacgtggaatgtgaatcagttaaatcccttttgtttataaattacccagtcttggatagttctttatagcagtgtgaaaatgaattaatacacccagcatccactccaataagttaggaagaaaatggccaagtaaacttcaaggaggcagaagaaaagaaataaatattacaacagacaataatgaagtagaaagcaaacatcaaagctaaaatttggccatttgaaaatactaacataattgataaacttctcataagattaattttttaaaaaataaagaatacacagaagactaatgtttgaaataaaaatagagacaccaccacagacctttcagacattaaaaagatgacaaaatgattttaaaagaagacaaagaaagaaagtaggcacaaatggttacctaaaatgaaaaggaagatagcaacactaatcctacagacattaaaaagataagaggattttataaatgctgttatgaagtgaattgtattccctacccccaaatttgcgtgttgaggtcctaacctcgaatgtgaccatatttggatatatgaccttttaagaggtaattaaggctaaatgagcttgtagggatggggccctaatccgatgtgactggtgtccttatgagaggagaaagagcaactaagaatgtgtgcatagagaccaggatgtgaagacataataagaaggcagtgtggctgggtgcagtggttcatatctgtaatcccagcactctgggaggccaaggcaggtggatcatttgaggtcaggagttcaagactatcctgaccaacatggtgaaaccctgtctgtactaaaaatacaaaaattagccaggcatggtggcgggtgcctgtaatcccagctacttgggaggctgaggcaggagaatcccttgaacctgagaggcggagattgcagtgagctgagatcgcaccactgcattccagcctgggcaatagagtgagactcagtctcgagaaaaaaaaaaaaaaaaaaaggcagccctctgcaagtcaaagagagagacctcaggagaaatgaaacctgccaaccccttgatcttggacttccaggctccagaacctgaagaggcaagccacagactcagagaaaatttctgttgtttaagccacctagtctgtggtattttgttacagtaccctagcaaactgatacaagctcaaataaatttcattgtttagataaaaaaataaaatctcttgataaagcaacttactcaaactaacacaagaaaaaatagacaacctgaatgctcttagtgaagacattgatccataattaaaaatcttcattctaaggaagctctaggccaacgtggcttcactagcaaattataccaaaaaatttaagaaaaaaatgctactcttccacaaactcctccagagaatgatgaaaggtggatcattctcccaatgcattcccatcataactttataccaaaataagaatacataaaaaccttattgaaataaatggaaaaaagccaggtagattagttgaaaaatgaacatgatctgaagatgcacttcaaaaggaggatatacagatggccaataaacttatgaaaaggctcaacttcattaccctgcagggaaacgaatgttaaaaacacggtgaggtaaccgtacacacccaccagaatggctaacattaaaatcaagcagtgaggaggaacttgggtaactggaactcttacacactgctggctacaggataaattggttacagtcactttggaaaatggtttggtagtttttactgaagctgaagattcatatacactgtgacccaggaatttctctcctagatatatagctaatataaataagtgcatgcagttatatacaataatttcaaagcagtatcattcatgataacactaaagagaaaacaatacaaatacccatcaaccacagcatggataaatgcattgcaatatagcatgcaataaaagtatctattgcaataaaaattaataaattatagctacataaaaaatggggatcagctgggtgtggtggctctcacctgtaaattccagcactttgggaggctaagacagaattgcttgagcccagaaatttgagaccggcctggtaaacagagtgagattctgtctctacaaacaaattttaaaaattagctggatgtggtggtacatgtctgtagtcccaggtacttaggaggctgaggcaggaggatcacttgagcccaggaggtggaggttgcagtgagctgtgatcatgccactgtacttcagcctgggtgatagaatgagaccctgtttcaaaaaaatgtggatgaatctcacaaatatgaagtggagtgaagtaagctattcacaaggatgatgacatactctaggattccacttatgtaaagaacagtatagactgaataaaactatagattttaaggatgaacaaatagtaggtaaaaatgacataaaaaggcaagtaagttattaccataaaaggtggatggtaccttgtgggggaaggatggggttgtgattaggaagaggtaagcaaagaggtgctagagtcttggaaagttttgtttcttgaacttgatggttgttatatgggtgtatgctttatggtggctgtgaatttctttttcacttttccctctgtgctttatgtttcacaataaaaaaagttaagattaaatgagaaaagtgagcaccccaaattctttagaattaaaatgtaagtttcatgaaaggtattgctattagttctagcctttgtaatcttacatccattcacctattcatccatctgcctaccacccaaccatccatccatccatccatccatccatccctccattcatctattcttctattcatctattcttctattcatatttccttttaccatttattcattcacccacacctgaggcagttcggttctccctagaaaattatagagattgacagtttgaataataatgactagaccttgagatgaatgattgaaccatttctgagctgcctagttttcctctcttggaagccaacatgttcctcactaagaactgggcatgggtttggttttctattgatgtgaagccttacacagttgtaagatctgtagatctgggctagggtacagagaaattgactgtccactttcttttaatttgcattcattgataagatcattatgaacctgtgctgacacagctataatctcagggagaggcacacacagtcccatgttgcataacaatgtttttgtcaatgaaggatcacatatatgacagcggtcccattagattataatactgtaattttactgtaccttttctatgtttagatacacaaatacttagcattgtgttacaattgcctacagtattcagtacagtaacatgctgtacaggtttgtagcctaggagcaattggccatatcatgtagtttaggtgtgcagtaggttataccatctaggtttgtataagtgcactcttggatgttcacacagtaacaaaatcacctaatgatgcattttttgaatgtatctctgtcattaagtgatgcatgacaaataaatgcccatatacctggaatcagaaattccattcctaagaatctattctcagaaaatactagtgctggtactataaagatgcaagtacaaaaagtgtttatttctgagttgtttgtaatggcaaaaacaatgtagaaatatcttaaatttccatcattaatggactgatgaaagaaattatggaaaagtcatatgatgaagcataacttcaccttttataaatgagatttatgatgacctagaaagttctccaagttatattattaaatgtaaaaggcaaattacagaataatacatttgataataagatatcacttgaatagaaatggtagttctcaatatatatgtgcaggtacttgcatatggagtccaaaaggatatacatacactccaattttaatgggtgatttatggggaaagaaatgagattgggggaaaggaaactgaaaagggactttaagattaccgtactttataattctaaattttagaattgttacaagaacacattcatgcattacttgtgtgttttaaaagtaatttttaaacctttagttagaaaattaaaaagtaatgcctgatcattttttaaaaattagaaaatatataaaataatgaagaaaacatttaaaaatctgtattttccttatccagaccccttcaagtcttattttaataattataatactgtatttttactgtgccttttcaagcctagtttgtgcttgacagtcatagaatgaaccaatctttccaagccttgcttcaagcaccaaattctactgaaataaaagaccttgccttgtacaatgaagatgacgttgagctagggattagatgatttaatttaaattgcatccgtaacccaggtcaccttgaacaagttatttaacctctctgagctcagtgaacaggtttgcaaaatgaggataataacgtcggtctttctgcaggactactgtgaggattaacgaagtaatctgtgacattgtgctttgcctctacgtggacctagtatattatcaagactgtcatagatggctcttattattttgagatacgtcccatcaatacctaatttattgagagtttttagcatgaagcgttgttgaattttgtcaaaggccttttctgcatctattgagataatcatgtggtttttgtctttggttctgtttatatgctggattacatttattgatttgcgtatattgaaccagccttgcatcccagggatgaagcccacttgatcatggtggataagctttttgatgttctgctggattcggtttgccagtattttattgaggatttttgcatcaatgttcatcaaggatattggtctgaaattctcttttttggttgtgtctctgcccggctttggtatcaggatgatgctggcctcataaaatgagttagggaggattccctttttctattgattggaatagtttcagaaggaatggtaccagttcctccttgtacctctggtagaatttggctgtgaatccatctggtcctggactctttttggttggtaagctattgattattgccacaatttcagctcctgttattggtctgttcagagattcaacttcttcctggtttagtcttgggagagtgtatgtgtcgacgcatttatccatttcttctagattttctagtttatttgcgtagaggtgtttgtagtattctctgatggtagtttgtatttctaagagctatctatgacaaacccacagccaatatcatactgaatgggcaaaaactggaagcattccctttgaaaactggcacaagacagggatgccctctctcaccactcctattcaacatagtgttggaagttctggccagggcaattaggcaggagaaggaaataaagggtattcaattaggaaaagaggaagtcaaattgtccctgtttgtagatgacatgattgtatatctagaaaaccccattgtctcagcccaaaatctccttaagctgataagcaacttcagcaaagtctcaggatacaaaatcaatgtacgaaaatcacaagcgttcttatacaccaacaacagacaaacagagagccaaatcatgagtgaactcccattcacaattgcttcaaagagaataaaatacctaggaatccaacttacaagggatgtgaaggacctcttcaaggataactacaaaccactgctcaaggaaataaaagaggatacaaacaaatggaagaacattccatgctcatgggtaggaagaatcaatatcgtgaaaatggccatactgcccaaggtaatttacagattcaatgccatctccatcaagctaccaatgactttcttcacagaattggaaaaaactactttaaagttcatatggaaccaaaaaagagcccgcattgccaagtcaatcctaagccaaaagaacaaagctggaggcatcacactacctgacttcaaactatactacaaggctacagtaaccaaaacagcacggtactggtaccaaaacagagatatagatcaatggaacagaacagagccctcagaaataacgccgcatatctacaactatctgatctttgacaaacatgagaaaaacaagcaatggggaaaggattccctatttaataaatggtgctggtaaaactggctagccatatgtagaaagctgaaactggatcccttccttacaccttatacaaaaatcaattcaagatggattaaagacttaaacgttagacctaaaaccataaaaaccctggaagaaaacctaggcattaccattcaggacataggcatgggcaaggacttcatgtctaaaacaccaaaagcaatggcaaccaaagccaaaattgacaaatgggatctaattaaactcaagagcttctgcacagcaaaagaaactaccatcagagtgaacaggcaacctacaacatgggagaaacttttcgcaacctactcatctgacaaagggctaatatccagaatctacaatgaactcaaacaaatttacaagaaaaaaataaacaaccccatcaaaaagtggcgaaggacatgaacagacacttctcaaaagaagacatttatgcagccaaaaaacacatgaaaaaatgctcatcatcactggccatcagagaaatgcaagtcaaaaccacaatgagataccatctcacaccagttagaatggcaatcattaaaaagtcaggaaacaacaggtgctggagaggatgtggagaaataggaacacttttacactgttggtggcactgtaaactagttcaaccattgtggaagtcagtgtggcaattcctcagggatctagaactagaaataccatttgacccagccatcccattactgggtatatacccaaaggactataaatcatgctgctataaagacacatgcacacgtatgtttattgcggcattattcacaatagcaaagacttggaaccaagccaaatgtccaacaatgatagactggattaagaaaatgtggcacatatacaccatggaatactatgcagccataaaaaatgatgagttcatgtcctttgtagggacatggatgaaattggaaatcatcattcttagtaaactatcgcaagaacaaaaaaccaaacaccgcatattctcactcataggtgggaattgaacaatgagaacacatggacataggaaggggaacatcacactctggggactgttgtggggtggggggaggggggagggatagcattgggagatatacctaatgctagatgacgagttagtgggtgcagcacatgagcatggcacatgtatatgtatgtaactaacctgcacattgtgcacatgtaccctaaaacttaaagtataataataaataaataaataaataaataaataaataaaaaagaggaacaacaacaacaaaaaagactgagatttttcttgcaaccaaaagataaatgaaagatacttgtgagagttaatcacctccttcaggaaacaggttcttcagattattggaaacatttatcaatttaccatgtctctggcacagacatcagcagagccaagagtaaccggaatgggtacctcaatctgagcaacgaggaaacagagttatgcttcaggaaaggaaatagacacttgttttgcttttgtcttgaacaaaatgcttggattttaacatacaagtagtgtttgcatcacctcttgagattgtgtagtgggtattttttgaggtatagccccagcatcccatgatcctgtctttgtgcccttatcaagaatagtggacccctggaagccattttgtatgatgtgacctcacccctggtcaccgatgattggcttaaaaaggggcagcttgctcaagccggcccaatcagagtatctcttccaggagcgagcttggaaaatgccagcctctctattgaccgaagctgtatcagttaaccctttgatggcataataaccttcttctttacatttattaaaagtgagatttttgtattccattgatttttgtcctaactcagaggatagaatttgtcagtagtggtaagactaaaattatacctgttgtggttttctggctcttctatctgtcacgctttctttctcgctttctccccttaaccctcctaccctcactccctgcccccgtcctttttctaatcatgcacataaacaaagggatagacatattcacaaaacagtagtacttgtcacgaacattttttttcccactgctgtgaaagtttaaaaaaaccaacgaaataataataggctttcccatccacaacccccattccttaccagctgttgtattttataagccaacaaaacaaacttgtggctggacaaagcagcttccagaagaggcaggcaaattcatttctaggccagcagtttaattggatgcaacaaagaacatggtgtggcttttctgggcacttgaagtagaggcaggcttttcgttccagcaaacacaggctgcagaagctgtatgatttgtagtaattcattcgacatgagcaacaattgtgaagaagctttgtgtcatcaatatgagtccccaaacaagtattttaaaataatgaccttcacagccaaatttataacggtatcctctctaccacccactgccccccatgagtagctgagaagccagtctgggggtgtgggaaggtaggatcctcccaagaggaatgaaaacactggagagagagagaagaagaaaagaataaggagaaatcattcttcctggtctcctgatggctttcctgttcctgattcctgttcttcagttccatgagacactccagctgccttataataaatcaccctttatttatttatttatttatttttttgctaaagttggcttgagtgaagttctgatacttacaacaaaagaaatctaaataatactaagagatataactaccctccttttccaatgaggaaaccgagagtcaatggggtgaagtaacttgcccaaggtcaaatggctttcctccccaggtttatttcactcccaagaccaggacctttccacagagctgatgaggacaagaaatgtctaagctgacagcagcctgaattatgagggcacgctgccttgctgatcttctctctctgcaagaagtcatctaataagaatctcattcctcatttatttgtttttcctgtgctttcttataattcgtcttcccatttttctggtcaggaggaaaaccctgcctccagccacagccctgaaaatctctgagttatggtgggttgatgagagagggatttggaaacgagattttgattctcctcctctccgatctgaggccaggcagcatgcttgctgtttaaccgctgttaattaattgtgtactatgagattaaatatatctattaggctactagcctttaccatcatcattacaagtccatgaatgttaaaatgtacaggaggaattgtgaagatttactgacatcaaaagttcttctggaaacaaactttgtaaaaaaaaaaaaagatgtattaaattattttaattgtgggaaaaaaaaagcaagtggcaaattttagtcttgtcagtcttccaaagatcaacacactctagcttcccttccaccttgtctcatacacaggcatttctgagatgaaagaagtgggccctgccattgaacagaatttatgcatttaaatattcatcatttctgtgaaaaagagaagaaagtaagtatcacccataaacctataatcttagtgccatccgtgtttgaaatttggtacatttttttccccatcctttttcttatgcatcagtttcattcagaggtgttgtcaaatgtctatttaatttctaacatgcttttaaaaaacttaacatgacagtattagcattttccacactgctgcctgtttttttacacccataaatgtaaggacaggcaaaatttaagattgtagtgtaattatggtggacattcgcatgctgtatgtagccttcctctctccaaaggccaatacgcttattattaggagatgagccaaatattccttctccccactccacagaagccaggacaggggaacaggatgtaagttcagccacataatgctttaagcctagtgagaggagtgcaaaggtacaggaagatgaaaaatgattccgtgtagaggtggcactgagggtgtgtcaatggctgctgggtgtgaactggtggatccagcggcagcatataacatcattcctggggcgtgaccctgtctctcttcccacttctcagtctctcttggttcctgccattcccaatccaggttcttcctcctcctcatagacttagaactctctgttacctttttaataatttcctttctgcctacattagccagaggcatatcatagccagaaactctatccctggaactaggtcttcacagcttggacagctgagttcattcattctgttcagttaaaaactatttattaaacctctaccatgtatcttgtgctgctctaggaagtagaaatacggtaataagaatcagttttaaaaaaatcatcactcagctgggtgtggtgactcatgcctgtaatttcaggactctggcaggttgaggcaggtggatcacttgagtccaggagtttgagaccagcttgggcaacatggcgaaaccctgtatctacaaaaaatacaaaaataagccaggcatggtggcgagtgcctgtagtcccagctatataggaggctgaggtgggaggatactgagcccaggaggtcaaagctgctgtgagccattgtcatgctactgcagtccagcctgggtgagagagtgagactctgtcaaaaaaaaaaaaaaaaaatcaccactcacatggaacttactttctagtggaattctggtatgttttaatggaagataaggttgtatctgaattactattggtaaaggtgagcaaaatttagagtgatgtaaacagttaaggagaggtgcttataaggttccaaatggttaaactgtatataaaccctagttcagaatggaaagcctgcatgacctctacttgctttaagttatgtagtcatgtgtcgcttaacaaaggaggcacgttctgaaaaatgtgttgttaggagattttgtcattgtataaacattatagagtacgcttacaccaacctagatggtataacctcctacacacctaggctatatggggtagcaaattactcccaggctacaaacctgtacagcatgttactgtactgcatgctgtaggcaattgtaacacaatggtaagtatctgtatttctaaacatatctaaatattgaaaaggtagaataaaaataaggtattataatcttatgggatcaccttcatgtatgcagtctgtcattgaacaaaacatcattacgtagcatatgactgtatttatgtgtttccaaacatatcagcagtgtgtgaaagtgctccttatcctgccttattgctgacatgggatattatcagtagttgttaaatatttgctagacatcaggaagaatagctaatggatgctgtccttgatagctgggtgatgggttggtctttcagcaaatcatcatggcacgcgtttatctatgtaacaaacctgcacatcctgcacatgtaccccagaacttaaagtaaaagttgaaggaaaagaaaaatatttgctacaatgatttttgtctctttagagtttaaaaaaaggtgagcatattttcatgtttgctcatggtttgtttctttttgggtaatttgttttctttacctcattttgttttctgttgagatgtttgcccatttcttgttgattggcaataactctatagtctagatattatttctttatctatcatatttgctgcaaatatttctcccagcctattattggtttgttttaactttgtggtatcttttgtagtgcagattttttttatttttgtgtagccaaatctgtcaaatcttctcatttttaccttctcagttttatgtcttgcccagaaaggcttagctttagaattataaaaacattttctaatgcttttatagtcttgtgctttatctttaggtatttaatacatctagaattcatttttgtaagtggtatgaaggaggaatctaacctctttttttaaatggaaagccccaacacagtttagtaaatactgattctttttgtcctccccttcaaaaatgctacacgtacgctatatgccctcatattcatgcttctgtttctgggatgaaaagaatgaattctaacatgcaactaactccaaatcaatatttcttatggagatatgcaatttcccaatatgaaaaccaaactaactcacccaactcagattattcttttgatttcataccttcagcattgtggctggttttctttctcacatgcatgttacccggggttgctcctgaaacagtttaccatataaatagacttcatttccccagcaaacgagggcaggtctggtagttttttctgtttcacatattccccaaccctatagggttttacatggagctacaaattagccaatttcaacagactttgcttttggaatattctttatgccttgttctcatttgcttccaggagaaatcataatattaaggattcttgggagtgagaaggagacataatatattctaataatattagagtcacacgcacataggaatcacatagattccttggtttcatccctaaagtttctgatttattggtgtaagatttagccctagaatttgcacttaaaaaaaatcaggcctttgctcttcctgcagcctactctgttatttgtaaataagacagcaattgggcaaccagagctgtgagaaaaaaaaaactggtatagcaagtgattctttagggccactgttgctattttaataacaaaggatgctacaaataaacccttcagtcctgtcatttccaaggccattttgacatttatttcaataaataacaacaaattatttcaataaataacaacaataataaatagcaacaagctggaggtgtctttctaactaaatgaatcagcaaggcctccccccaaaaagaaaaaggaaaatccaaaagcaccagattataaacatcactgttgagtgtctttcagagtgaatggagattatgccattacacccacacacttctctctcttctaaaggcaccatccgcggaaagattctgatgctaacatcagtcagttgttgtggaagatgacctagaatgaaccattgcttctttttctaccgtctattctggaaattattaacagatagattcccgagccagaagttgagaaaacactgggaggttgtttattctgatctggatttttagagatgcaaatgcagcaaaggagttatgaacataatgaagggaatcacagtattttaaccagccatctgtacatcaaggcctcattgtgtcttcctgaaaaaaggtaaatgggtgctctatttgtcaagagaggagaagtgacttctggaatctttacttctgataactcaagtccagacccagcaaattagttcatttataaagcatctcatttctcagtgccaatgcatatgcccataaccacccttgtctcagcacaaatatacatgcaaatgcatgcacataagttgtgctgcttttgttttcacagttgcaaaatgattgctgtacccaaaattgcattcctatttaaggcaggaagaaggggggagggcaaaaggataaaaactcaagccagttgggtccattcttaacaagagctcttccggaagcctgtctagcaacttccatttgcatctccactgttgagtccagcagcacggatagctagggataatgactattgcagtagggaatattctatcttgaatattgaatatgaagatggggatgcggtgggtaggtaaaaaggggagaatgaataccgatagttaagtagcagtgtctgccttggtttaccccaagtatttctcaaacctatccaattttctccttccctaccgccaacatcccagtgaaaccacaatccactctcagctggacattcttctagctggtcttcctgcacagcaaaaggatgtttatcttttaaaacttacatctattatgctgctctgctggttaaaacttataatgtcttcctatattagttagaataaaatctgcacatgtttttatgacttaaaatgcccacatgacttgatatctcccacttatttttttcccttctttcctcctggtttgtgacagtccaggcacgttggcctccctgcagtgctttaagcatgtcatgctctttcctatcttagggcctatgtacttgtttctccctctgcctgccttctctcattcttcaactttttgttcaatgtcacttttttttttgaccatcccatctggaacactgtgatggtttttttgatgtgtcaacttggctaaactacagtctccagttcacaaacaaacaaacaaacacgagcttaggctttgctgtgaagatcttttgtagatgtgattaaagtccataatcagttgacttgaaaaaaggatgattatcctagatcatctcagtgggcctgtttcaatcagttgaagggacttaaaagcagaaccaaggcttccctgaagaagaaattccacctgtgaacagcagcttcaatccattcctaaagtgccagcctgccctgtggatttcgaagctacctaggcaggtcccacaactgagtaaatcgattccatgcaataaatctcttaatatacatctcctactggttctgctttccgggttaaaccctgatcgataacaatcctcctcctcccacctactagttgatctttatcaaactgccccatttatttattcaaaagcactgctcttctgaaaaattctcttgctcatttatacattttctgttctgtttttttgtcttccctactcggatgtctgctccatgaaggcagaatcagtgcctaccacattcaacactgtagaacaatacatagcccatagtccatggtcactaaatatttgcggaaagaaagaatgaatgggaatctagtaataaaatctggcccaacaattcactcccaggttacattaaattacacttcttggccgggcacagtggctcacgcctgtaacctcagcactttgggaggccaaggcgggcagatcttctgaggtcaggagttcgagaccagcctggccaatatggtgaaaccccatctctactaaaaatacaaaaaaattatctgggcgaggtggcaagtgcctgtaatcccacctactgggaggctgaggcaggagaattgcttgaacctgggaggcggaggttgcagtgagccgagaccgcgccattgcgctctagcctgggcaacaagaatgaaactctgtctcaaaataaataaataaataacacttctcagttataactgcagaaattatttgacaagactgcaaggaaaaatatttgaggatattgattatattgggaactaacataaatattcactgataggacatctgttaaatgcattgtggtacattcattcactgaaatgctatacaactactgaaaatgaaaaggtagctctatatgtgtggataagaaaataatttcaacaaatgctactaagtgaagaaaggaggctgttagaccacatgtatggtaattaatcttcacaagtatttaaaagaaaaagataacatgagaaaccacattttcaaatggctgcttcatgatatatacttgtgactaacaaaaaccctaagatagcttaaagtatgaaagatggtgaaatctgctgtctaagtcattgagaagaattataaaatgtaatgtttaaggaaagttcagacagatggagtaactgtttcttttcctttttcctagggctctgtgtttgttatgtgatggctggggtggtaggttgtataaacatcatgctttccttctcctctcttctcaaaatatcacagggatgtaatcgatgacttttctggctacagtgtattacttatttggaatattcacatctggatcaattgtcagcacgtttcttggttgttgctttattcattcatgtattcaactaatatgttgaactaagcaccctggttgggcatcgagcttaggaaagtaccttcatgagatagtttctctcttcaaggagtgttataatttactcccaagcatcactcacattgtgaaacccacatattactccaaacaattgttagaagatgatagggcagattctgttacattcagaaaaccccaagaggctcaatgacttatctgggagaacctggaattgtctcttaactggcattcagtgctcattgaaagccagctcacaggccctttctttcatcccagaaagtgattccaggtttttcctttggctcttttatagaagggtgcctcttatgggtttaactatgtctctgcaaaaattcatttgttgaaatcctagctcccatcatctcagaatgtgaccttatttagaaacagggtggttgcagatgtaattagttgagatgatgtcatactggagtagagtgggtccctaatccaatatgacaggtgtcctaatgaaaaagagaaaggctgggtgtggtggctcccctctgtcatcccagcactctgggaggccaaggcggaaggatcacttgaggtggaaggatagcttgaggccaggagtttgagaccagaagtttgaaaccaggagtttgagaccagcatgggcaacgtagtgaaatcccatctctacaaaaaaattaaaaaattagctgggcattgtggcaggtacctgtagttccagctacttgggaggcagaggcaggcggattgcttgagactgggaggggggatgcagtgaggtgtgcttgtgccactgcactccagcctgggcaacagagtgagatcctgtctcagaaaaagcgggggagaaatttggacacggacactcaggcacacagggagagcaccgtgtgaaggtaaaggcaggataggggtaacgcagtagaagccaatgtgcacccaagactgccagcaagctgccagaagcgaggggagaggcagggaacacttcctccctcacagcctcagaaggaaccaagcctgccgacaccttgatctagacttctggcctccagaactgggagacaataccgttctttttacctttactttattgaaaaagtgttttaattttttttaacttttattttaggtttggagatacatttgaaggtttgtcacaaaggtaaactcttgtcatggaaatttgttgtccagattatttcaccatccaggtattaagcccaatacccaatagttatcttttctgctcctctccctcctcccatcctccccgctcaagcccaatacccaatagttaccttttctgctcctctctcctcccaccctcccccctcaagtagaccccagcgtctgttgttcccttcttggtgttcgtaagttcttatcatttagctcccacttataagtgagaatgtgtggtatttggttttccattcctgcgtgagtctgataaggataatagcctccagctccatccatgttcctgcaaaagccatgatctcattcttttttacggctgcatagtatcccatggtgtttgtgtaccacattttctttatccagtctgccattgatgggcatttaagttgattccatgtctttgttattgtgaataatgctgcagtgaacattcacgtgcatgtgtctttatgacagaatgatttatattcctctgtgtatatacctggtaatgggattgctgggtcgaatggtagttctgcgtttagctctttgaggaatcacgatactgctttccacaacggtttaactaatttacactcccaccaacagtgtgtaagtgttctttttcgctgcaaccttgccagcatttactttttgacattttaatcattgccattctgactggtgtgagatggtatctccttgtggttttgatttgcgtttctctaatgatcagtgatattgagcctttcttcatatgcttcttggccacatgcgtgtcttcttttgagaaatgtctgttcatatcctttgcccactttttaaggttttttttttcttgtaaatttgtttaagttccttatagatgctggatattagacctttgagataatagacttctgttgttctaagtcacccaggttttggtactttgcatggcagccctaggaaactaaaactataacaaatcttatttcttagaaaatatatgatttttcactattgctgactgaaccaaaaaaaacagttttgaggctagatcatttggagactagtcattaacattgatttaatatttgattcaatgaaaagcaatttttttcttttgtttctattttttcaatttatggttgacacatagtagttgtatataattatggggtagaatgtgatgtttcaataggtgtatacattgtgttaattgaatcagggtaattaacatatctatcaccttaaacagttatcatttctttgtgatgagaacattcaaaattctctttgctagctattttgaaatatacaatgcattattattaactgtagtcatcctactatgctactatgcaatagaacaccagaacttatttctgctttgtaactgaagttttgtacccattgaccaatctctctccatcaccccccactccctattatctgttaatcactgttataccctctacttctatgagaacaacgttttagagtctacatgagtgagatcatgaggtatttgtttttctgtgcttggcttattttacttaacatattgtcttccgggttcatccatgttgtctcagatgacaggatttcattctgctttatggctgtatataatattccattgtgtatatatgccacagtttctacatccattcatccactgatggaaatttaggttgattccatatcttggctattgtgaataatgctgcaataaacatgaggtacaaatatctcttctatatattgatttcatttcccttggattttttttggataaaacctcaaaaatatgggcaacaaaagcaaatatatacaaatggaattaaatcaaactaagaagcttctgcacaggaaggaaaacaatcaacagagcaaagagacaacctacggaatgggagaatatatttgcaaactatacatctgatgaagggttaatatccaaggctgggtgtggtggctcatgtttgtaatcccagcactctggcagtctgaggtggaatgatcgcttgaagccaggagtttgagaccagcgaacaaagtgagaccctatctctacaaaaaatttaaagattagccaagtgaagtggcatgcacctgtggttccagttatttgggaggctgaggcggaagaatcagttgaacccaggagttggaggctacagtgagctatgatggtgccactgcactctagcctgggtgacagagcaagatcccatttcagagaaaaaacataaaataaagactcaaacaactcaacaacaaaaaaccaaataagccaattaaaaaaatggacaaaatacctgaatagatatttctcaaaagaagacatacaaatggccaacaggtgtatgaaaaaatgatcaacattgctaattatcagggaaatgcacatcaaaattacagtgagctatcaccttagtcagaattgctactatcaaagacatgaaaagatgacaggtattggtgaggatgtggagaaaaaggaacctttatatactgctggtgggaatgcaaattagtatagccattatggaaaacagtatggtgttaaattaaaatttaaaaattaaaaccaaaactgttctgtgatccagcaatcccatggttgggtctacacctggcagcaaacttcctcaacacctcctcaatcaagcgctgtgtgctaactgtttaagggctctaactgtatgatacttcttagttgtctgtaaggaatagctagtctaaggaggaataggaagagataagaaaagcagacacattcacataagacactactgtaatagaagttcagatgttactggatttaagcaacaagcaaattaattctgtgtcatctaggctttaaacactggtgagattctgacaggtctaaattgttgggagaaggagggaggacatttaagggagaaaatttcaaagtggtttcattttacgtgagcctgagttagaggaatttgaaaatatgatgcataggtatattaatggagtttcatttactgtacaaatgtggaattattctcatttctcaaataaaaaaagccaatttattctataacttccaagctggagggctgagtgaataataaaatgtgtttgaatttttgtgaaacgttgatgcatcttttcctggttaagcaaaatactcactattccacatcactattatttagtccagataccaatctgttgtttatgggtattgaaaattctgatcgtggtgattgctgtgttgccattttaatatttacagttattataatttttaaatcttttatatagtgtgaaataatattatctagacttttattttgtgcaggtgctaagcctgatacaaaaaatgtgcctaaaaatgtcaataactttggaaagctagatgtattaaaatgcctgaaggagaccaagcagtggttatgataactgtaatagtaatttagaagaatgcattagagctaatgttgagaaaaaataaaacagagtatggtaggtacaccttaggttcacaaaattctgtaattggacaaaattatggtgaaaatgaggaaactgatggctacatatctgtaagaataattttgcttttaactgtatatactccaaacattatatatgttcctgcaggacaattggtcctaagatatgttaattgaagaaagaaatttctggcataaaatgtgactatctctagcttggaagtcaacttaaagtgggaagtagtagaggtaagaagagcacagaggagtggaagctaagaataggaaagggtgcaagaagcacagctgggcacggtggctcacgcctgtaatcccagcactttggggggccgaggcgggtggatcacctgagatcaggatttcgagaccagcctggccaacatggtgaaaccccatctctactaaaaaatacaaaaatacaaaaattagctgggcgaggtggcacgcctctgtaatcccagctacttgggaggctgaggcatgagaatctcttgcacctgggaggcggaggtttcaatgagccgagatcgcaccactgcactccagcctgggcgacagagcaagactctgtctcaaaaaaaaaaaaaaaaaaaagaaagggtgctaggagtacgtgtgttgtggagggtctccaattctcaggtgaggcactgatgcttagcttagtttaccaggcaacaggggaacctctgaaagggttagagcaggccagtgacactgtgcctgagatggtagatgctcagtgaagttgagtgttgagtgaatgattggtcagaaccaccctggagaaaattgttagtacctttacagggaagataataggtaagatgtaccgagggtcctgagatccaacaggagtgagctcatgaaattcctcttcggccaaagtaaagtgccccccaggcttccactgctttcaaagaaacagcagtgactggctcttgctcttgattcctggaatctcagaattctgggaaattgggaaaatcaggaaatgtgaaatacatttggttcatataaattgcaactctttttttttcttctaataagtgtttgttgctggtagaatcacacagctgtttcctaaatcaaagatcaatttgttatattatttttactagtggcttaggggtaattgtttctggaaaacatctgttctataattagaaaacaaagatttattttccctgactgggtgtaattacttttggggaccgagggaaagctttagaattgccatgtcaattcaaagaggattgtttgcagtgaaatatgtccttttaatttttcttaagtagctcggaggctggaagaaaatgcatgtttattagcattgtataggctgtaatagaataaagcaaaattcccagatgtgtatgggcttgttaatacaaataactccagtgatttcaactcagtcaattacaaagaattccatttttgaaaagaaatgaatggatatcagagtgttaagggcctttcctggcaagtccatagatagttctaattctaattctctaattagaattagattgattgcccctttggcaagcaaagactcttacagatgccagggacttactctgatttgctttttgtggtgacgtagggtggatttgagctcacatgattccgtgcaccctaagagagtcctgctctgaggcttgattttcagccctgtcttctgcttgcgaacgtgtcgccctccaccccatccctgccacccctcaccactgtaccctgagctctcactcatttctgcagttctcctgatattacatccaagccctgattacatgctgttcattgagtcacttgaccttcccagtctcaattgtaccctgatgtcaccagtttcctattgacatatgtgacaacataaatgaatctcaaaataaactatgttgagtgaaagaagcaaggtgaaagagtacatgctattttgtggcatttatacaaaactctagaaaatataaactcatctgtagtgacggaaagatctgtgcttgcttggggctgggactggagaagaccaggaaggagaaattccaaaaggaaacttttgagggggatggatgtgtttgcaatcttcattgtggtgacggtttcatgagttgtgtacatgtgtcaaaacttatcaactcgtatacttcatcttaaagtctgtttagtctgatgttagtatgccatgccagctctcttatggttgaaattgtatactttaaatatgttcaattgattgtatggtgattataccttaataaggcatttttctttttcttttagaataacccagtggaaatctctcacataagaagtgatagaactacacatctgagtgtaggacgatctgattctaaagtccgtgcccttgactacttagtaattattgcttcttctgtaatgcaaatagccactttgtgtatttggtatggctgaacttctttaatattggaaggtttgggaacagggaataaggttctttcccatacctctgatggggggggaatattagagtttctgcagagtaatttggtgatgtcttgaaagctttatgaatgcacatatgctttcatttatcaattccatatataggaacccatcttaaggaagtaagaataaatttctgcaaaaacttatttacaggcataataagcacaatttgtttcataaaaatgaaaacttggaaaattaatctgtaccatgcagccattgacattattttagtagaagaatatttcctaacatagaaaaacattcagagtatatgattatgcaaatagatccattttaataaaatgtataagttatctgtgtgaagaaaaaagtctggaagtaggttttaaatggtaatatggtagttacttctgagagaggagtacagataatgggcgattttaattctatcctttgtgctttttttatattttccacatttttcacaaatggctatgcagtgatttcatttatcagataaaaccataagtaggtaccacttaaagagaaggtatacctgtgtgtaagtttgctttcttgggtgctcttaaacttctggatatttccttggatgtagtcatccattaggatagatggaggaacatcccgggtgtgggtgcatatttataatgacactgagtatacaagtgtggtttttaggattagaaaacccaatcgttcaaagaaggagtgttcctacctgagtcaggtagaaaccaggtaactggaccagcaaggtaattgtggcagagaactcgtgattgggaaagagatcacatcttatcctgatggagctcccttgcccagatcaagggcagggcctgtataaatagggcttttggataaattgctgcccctatacactagcccgccattgagtgtgcaaactcaccccttcactgccatgaagttgctttacctcctagctcttttgagaccttgagatgcggtcgtcataccatgtctcactttaccatcagccttggtctctgccatgtggctgcagatgctctgctaccttcctacacatactgttcctctcacttggctcttcctttctttctctcccactcagccttaccctgtgtcctctggaatttctgtgcttgaccttcaaattcccctacattctctatctttttacacactgcttctctttggcattaaaacttatgtttatccaatcagaaaaaaatgtctccttctacatatccaaatatccattggactctaacatttccatattccatagaaaacacatatagttccttcctgcagcctggaaggaatattgtgagagaatagatacattcttcaccagctaccattatctacaaatagaacttgtgagttgggcataacctttaggccaattctctatacatgtaaaaacaatagaccactttattcaccaaagtatgaataaaacatataaaacagaacacttcatctttccccttaaatatgtcctttcttcatattattttactttttgaaatgtgaagtaaaatttacctacatacttttcatccagttggttaataccttaacttaaccagtccccataactagccatagccctctaatatcaaggatgtcactggattaagatttttaaaaaatgtgcagagcacaaagccaatgtttcaatttgacgtcttgtgactagctgctgttttatccttccatgttttctccctcctcaaataatacgtttacatgtctttgcctccacaacattataaattcatcatgtattttcttcatctgcacacacttgatataggaagcatccagcattgcacatgaaataatatgtaaggcagaatactcaaggagttaggattgacttgatttgggctgtgacttagaagctgagttataaggagtcattgcaatgttctcctttaaagtattttaacatagactatgcaaaattatgcatgggcagttagtttaagctttaactttatatccatccagtcacccaaaatgagaattcacattggaaagggtggtagatggagatgggagtgtggatatctagttagctatgtcagaggtaccatacccaatgcggttactatcagtgctctgttacccagattttggtcaacatccgaggctttgctagatagcatagtgatgatgcaggatctttttctccttagctcagctaggtccgggttcttctctcacaaccaggaaaaattagtcatgcgaacactcgaagagtgagtgaagtagaacttattaagcaaaaggaaagctctcagcaaagagaaaagtcctgaaagcaggttcctggttgtccccttcacagttgaatacaagggcttttacatacgtgctgatggggctggattccctagttgtataaggtgcgaattccttgtggctctgccgcattccttcagtgcacatgcaggcccttagtccactgcgggcatgttgcgcagggcaagccccctgtgcaagttcccttatctgcacaaaacacgggtcggagtttctccgggaacccttcacttactgtctgcctaaagcaagctggctaactcctttgagtgatattagaaatactcttattggtgaagatgatagcttgttaattagcacaacgattattagaaatgcattctcattggagaaatcaaagcattcaggttttgtgtgttggctaaaatattttagagacacccactaccttccattaccagggcatgaacatcttacaagattgtcacacgtacccttagaccatgaacctgaggctgggtcactgaccttggcttaattctctgacttgggagcatttctagtcttgcgaggataactgagagtaactgaatcctgcctctggtatgtttttgtgtctgtcttgacaaaatttgtcctataaatgtgatgtttatagttcccaaaagagagctggaagttcatttgagtctatggaaacgattgcgtgaactgtgttgagcctgcttgccaataattatttattgaataaatgtccatgcgataggacaaatttggtttgagacttgcttttcttacagcctggaaggaacattgtgagagaatagatacattcttcaccaactaccattgtctacaaatagaacttgtgagttggccgtacctttaggccagttctctatacatgtaaaaataatagaccactttattcatcaaagtatgaatgaaaagattagacttcaaataggcaagtacaaagccctgtatctggacaatagagttgttgctttaaaggaaaaatttcttttaagcctcaggaactatctagggaagggtggaagaggaggatttcgaagattagctgatggccacattaaaggccagagggcagggactggaatgcccactctggggagacagccatggtggagaatgtggagatggagtcgttttgaatccagtggcaatgaagaaaagactttggttaggaaaaacgagtcccattgcaattatctttgcccataaggaattgtgacttatttccttcccttaaatcaataccagaccagacccaaatgccagcaagcacataacagcagtgacccagcaagcagtaggacagtgcatttaaggacagctccgtctggcctgaggaagcagcagttaaggttcaagtcctgtcttatcatcgttttcccgttcctcatttccttttgtttgagactggaggtcagtatctaggggactaaggcaaatgacacacaagagattttgttcctgggtgaacacctccttgactaaccaaatatttaactgtctattttcatctctggacagcatagtggtaagaatgggaggtggttaaataaggaaggatctgtcctctgctcgttcttccctgttacaaaaatgatcccacattgacttcccttcgctccaaattaaactgctctatttctcattcaggcatcataacccattgattgttttagtctgccaagggtactgtaacaaagtaccatagactgagtgtcttataaacaacagaaatgtgtttctcatagttctggaggctggaagtcggagatcagcgtgccggcgtggttgggttctggtaagggcctctcccgggttacagatggtcaacttctcattgtgttttcatgtggcaggaagatggtagagagctctctggagtctctttttataagggcgctaatcctgttcatgagcactccttatgacctgattgcttcccaaaggcctcacttcccaaaaccatcctactggggattagggtttcaacatgtgaatttggggaggacacaaacattcagttcattgcactaatctatcacttcgcttctgaatatatgttgtttgcagtttcaggagggaaggtgagaaagactggccagccccgaagggagggagataggggtggtatgattttaacaaattgaaaagaatgatgaacttccctgcaggccctggctgttcactttccagatgcgaaactctccaccttaaagtggagcccagagcagtaagacaggtcattggatccggattggaggcaaatcagctgaatgatgtgggaatatacgatgatgcatgtttgacacttttttccaacttctgtggcagatgagcctgcatggcatagtgagtctgcaactgtgaactcgggaaatcctgtaccttcccgtgcagtcgctccccagccatgcaggtatttccagagcctggagatcccagactacctttcaaaagaatgaattc

SEQ ID NO: 106 - DNA, 2326 bp, Homo sapiens
  Genbank Accession No. AL049389
gtaaatgtaggagaaagagccttggccttaaggaaatctttactcctgtaagcaagagccaacctcacaggattaggagctggggtagaactggctatccttggggaagaggcaagccctgcctctggccgtgtccacctttcaggagactttgagtggcaggtttggacttggactagatgactctcaaaggcccttttagttctgagattccagaaatctgctgcatttcacatggtacctggaacccaacagttcatggatatccactgatatccatgatgctgggtgccccagcgcacacgggatggagaggtgagaactaatgcctagcttgaggggtctgcagtccagtagggcaggcagtcaggtccatgtgcactgcaatgccaggtggagaaatcacagagaggtaaaatggaggccagtgccatttcagaggggaggctcaggaaggcttcttgcttacaggaatgaaggctgggggcattttgctggggggagatgaggcagcctctggaatggctcagggattcagccctccctgccgctgcctgctgaagctggtgactacggggtcgccctttgctcacgtctctctggcccactcatgatggagaagtgtggtcagaggggagcaatgggctttgctgcttatgagcacagaggaattcagtccccaggcagccctgcctctgactccaagagggtgaagtccacagaagtgagctcctgccttagggcctcatttgctcttcatccagggaactgagcacagggggcctccaggagaccctagatgtgctcgtactccctcggcctgggatttcagagctggaaatatagaaaatatctagcccaaagccttcattttaacagatggggaaagtgagcccccaagatgggaaagaaccacacagctaagggagggcctggggagccccaccctagcccttgctgccacaccacattgcctcaacaaccggccccagagtgcccaggcactcctgaggtagcttctggaaatggggacaagtcccctcgaaggaaaggaaatgactagagtagaatgacagctagcagatctcttccctcctgctcccagcgcacacaaacccgccctccccttggtgttggcggtccctgtggccttcactttgttcactacctgtcagcccagcctgggtgcacagtagctgcaactccccattggtgctacctggctctcctgtctctgcagctctacaggtgaggcccagcagagggagtagggctcgccatgtttctggtgagccaatttggctgatcttgggtgtctgaacagctattgggtccaccccagtccctttcagctgctgcttaatgccctgctctctccctggcccaccttatagagagcccaaagagctcctgtaagagggagaactctatctgtggtttataatcttgcacgaggcaccagagtctccctgggtcttgtgatgaactacatttatcccctttcctgccccaaccacaaactctttccttcaaagagggcctgcctggctccctccacccaactgcacccatgagactcggtccaagagtccattccccaggtgggagccaactgtcagggaggtctttcccaccaaacatctttcagctgctgggaggtgaccatagggctctgcttttaaagatatggctgcttcaaaggccagagtcacaggaaggacttcttccagggagattagtggtgatggagaggagagttaaaatgacctcatgtccttcttgtccacggttttgttgagttttcactcttctaatgcaagggtctcacactgtgaaccacttaggatgtgatcactttcaggtggccaggaatgttgaatgtctttggctcagttcatttaaaaaagatatctatttgaaagttctcagagttgtacatatgtttcacagtacaggatctgtacataaaagtttctttcctaaaccattcaccaagagccaatatctaggcattttcttggtagcacaaattttcttattgcttagaaaattgtcctccttgttatttctgtttgtaagacttaagtgagttaggtctttaaggaaagcaacgctcctctgaaatgcttgtcttttttctgttgccgaaatagctggtcctttttcgggagttagatgtatagagtgtttgtatgtaaacatttcttgtaggcatcaccatgaacaaagatatattttctatttatttattatatgtgcacttcaagaagtcactgtcagagaaataaagaattgtcttaaatgtcatgaaaaaaaaaaaaaaaaa

SEQ ID NO: 107 - DNA, 1698 bp, Homo sapiens
  Genbank Accession No. AL109718
gtcagaggggagcaatgggctttgctgcttatgagcacagaggaattcagtccccaggcagccctgcctctgactccaagagggtgaagtccacagaagtgagctcctgccttagggcctcatttgctcttcatccagggaactgagcacagggggcctccaggagaccctagatgtgctcgtactccctcggcctgggatttcagagctggaaatatagaaaatatctagcccaaagccttcattttaacagatggggaaagtgagcccccaagatgggaaagaaccacacagctaagggagggcctggggagccccaccctagcccttgctgccacaccacattgcctcaacaaccggccccagagtgcccaggcactcctgaggtagcttctggaaatggggacaagtcccctcgaaggaaaggaaatgactagagtagaatgacagctagcagatctcttccctcctgctcccagcgcacacaaacccgccctccccttggtgttggcggtccctgtggccttcactttgttcactacctgtcagcccagcctgggtgcacagtagctgcaactccccattggtgctacctggctctcctgtctctgcagctctacaggtgaggcccagcagagggagtagggctcgccatgtttctggtgagccaatttggctgatcttgggtgtctgaacagctattgggtccaccccagtccctttcagctgctgcttaatgccctgctctctccctggcccaccttatagagagcccaaagagctcctgtaagagggagaactctatctgtggtttataatcttgcacgaggcaccagagtctccctgggtcttgtgatgaactacatttatcccctttcctgccccaaccacaaactctttccttcaaagagggcctgcctggctccctccacccaactgcacccatgagactcggtccaagagtccattccccaggtgggagccaactgtcagggaggtctttcccaccaaacatctttcagctgctgggaggtgaccatagggctctgcttttaaagatatggctgcttcaaaggccagagtcacaggaaggacttcttccagggagattagtggtgatggagaggagagttaaaatgacctcatgtccttcttgtccacggttttgttgagttttcactcttctaatgcaagggtctcacactgtgaaccacttaggatgtgatcactttcaggtggccaggaatgttgaatgtctttggctcagttcatttaaaaaagatatctatttgaaagttctcagagttgtacatatgtttcacagtacaggatctgtacataaaagtttctttcctaaaccattcaccaagagccaatatctaggcattttcttggtagcacaaattttcttattgcttagaaaattgtcctccttgttatttctgtttgtaagacttaagtgagttaggtctttaaggaaagcaacgctcctctgaaatgcttgtcttttttctgttgccgaaatagctggtcctttttcgggagttagatgtatagagtgtttgtatgtaaacatttcttgtaggcatcaccatgaacaaagatatattttctatttatttattatatgtgcacttcaagaagtcactgtcagagaaataaagaattgtcttaaatgtcaaaaaaaaaaaaaaaaaa

SEQ ID NO: 108 - DNA, 4572 bp, Homo sapiens
  Genbank Accession No. AK000465
gagctagcgctcaagcagagcccagcgcggtgctatcggacagagcctggcgagcgcaagcggcgcggggagccagcggggctgagcgcggccagggtctgaacccagatttcccagactagctaccactccgcttgcccacgccccgggagctcgcggcgcctggcggtcagcgaccagacgtccggggccgctgcgctcctggcccgcgaggcgtgacactgtctcggctacagacccagagggagcacactgccaggatgggagctgctgggaggcaggacttcctcttcaaggccatgctgaccatcagctggctcactctgacctgcttccctggggccacatccacagtggctgctgggtgccctgaccagagccctgagttgcaaccctggaaccctggccatgaccaagaccaccatgtgcatatcggccagggcaagacactgctgctcacctcttctgccacggtctattccatccacatctcagagggaggcaagctggtcattaaagaccacgacgagccgattgttttgcgaacccggcacatcctgattgacaacggaggagagctgcatgctgggagtgccctctgccctttccagggcaatttcaccatcattttgtatggaagggctgatgaaggtattcagccggatccttactatggtctgaagtacattggggttggtaaaggaggcgctcttgagttgcatggacagaaaaagctctcctggacatttctgaacaagacccttcacccaggtggcatggcagaaggaggctatttttttgaaaggagctggggccaccgtggagttattgttcatgtcatcgaccccaaatcaggcacagtcatccattctgaccggtttgacacctatagatccaagaaagagagtgaacgtctggtccagtatttgaacgcggtgcccgatggcaggatcctttctgttgcagtgaatgatgaaggttctcgaaatctggatgacatggccaggaaggcgatgaccaaattgggaagcaaacacttcctgcaccttggatttagacacccttggagttttctaactgtgaaaggaaatccatcatcttcagtggaagaccatattgaatatcatggacatcgaggctctgctgctgcccgggtattcaaattgttccagacagagcatggcgaatatttcaatgtttctttgtccagtgagtgggttcaagacgtggagtggacggagtggttcgatcatgataaagtatctcagactaaggtggggagaaaatttcagacctctggaaagctcacccaggaaaaatatgcaatcgtcccattgatatacaggccactacaatggatggagttaacctcagcaccgaggttgtctacaaaaaaggccaggattataggtttgcttgctacgaccggggcagagcctgccggagctaccgtgtacggttcctctgtgggaagcctgtgaggcccaaactcacagtcaccattgacaccaatgtgaacagcaccattctgaacttggaggataatgtacagtcatggaaacctggagataccctggtcattgccagtactgattactccatgtaccaggcagaagagttccaggtgcttccctgcagatcctgcgcccccaaccaggtcaaagtggcagggaaaccaatgtacctgcacatcggggaggagatagacggcgtggacatgcgggcggaggttgggcttctgagccggaacatcatagtgatgggggagatggaggacaaatgctacccctacagaaaccacatctgcaatttctttgacttcgatacctttgggggccacatcaagtttgctctgggatttaaggcagcacacttggagggcacggagctgaagcatatgggacagcagctggtgggtcagtacccgattcacttccacctggccggtgatgtagacgaaaggggaggttatgacccacccacatacatcagggacctctccatccatcatacattctctcgctgcgtcacagtccatggctccaatggcttgttgatcaaggacgttgtgggctataactctttgggccactgcttcttcacggaagatgggccggaggaacgcaacacttttgaccactgtcttggcctccttgtcaagtctggaaccctcctcccctcggaccgtgacagcaagatgtgcaagatgatcacagaggactcctacccagggtacatccccaagcccaggcaagactgcaatgctgtgtccaccttctggatggccaatcccaacaacaacctcatcaactgtgccgctgcaggatctgaggaaactggattttggtttatttttcaccacgtaccaacgggcccctccgtgggaatgtactccccaggttattcagagcacattccactgggaaaattctataacaaccgagcacattccaactaccgggctggcatgatcatagacaacggagtcaaaaccaccgaggcctctgccaaggacaagcggccgttcctctcaatcatctctgccagatacagccctcaccaggacgccgacccgctgaagccccgggagccggccatcatcagacacttcattgcctacaagaaccaggaccacggggcctggctgcgcggcggggatgtgtggctggacagctgccatttcagaggggaggctcaggaaggcttcttgcttacaggaatgaaggctgggggcattttgctggggggagatgaggcagcctctggaatggctcagggattcagccctccctgccgctgcctgctgaagctggtgactacggggtcgccctttgctcacgtctctctggcccactcatgatggagaagtgtggtcagaggggagcaatgggctttgctgcttatgagcacagaggaattcagtccccaggcagccctgcctctgactccaagagggtgaagtccacagaagtgagctcctgccttagggcctcatttgctcttcatccagggaactgagcacagggggcctccaggagaccctagatgtgctcgtactccctcggcctgggatttcagagctggaaatatagaaaatatctagcccaaagccttcattttaacagatggggaaagtgagcccccaagatgggaaagaaccacacagctaagggagggcctggggagccccaccctagcccttgctgccacaccacattgcctcaacaaccggccccagagtgcccaggcactcctgaggtagcttctggaagtggggacaagtcccctcgaaggaaaggaaatgactagagtagaatgacagctagcagatctcttccctcctgctcccagcgcacacaaacccgccctccccttggtgttggcggtccctgtggccttcactctgttcactacctgtcagcccagcctgggtgcacagtagctgcaactccccattggtgctacctggctctcctgtctctgcagctctacaggtgaggcccagcagagggagtagggctcgccatgtttctggtgagccaatttggctgatcttgggtgtctgaacagctattgggtccaccccagtccctttcagctgctgcttaatgccctgctctctccctggcccaccttatagagagcccaaagagctcctgtaagagggagaactctatctgtggtttataatcttgcacgaggcaccagagtctccctgggtcttgtgatgaactacatttatcccctttcctgccccaaccacaaactctttccttcaaagagggcctgcctggctccctccacccaactgcacccatgagactcggtccaagagtccattccccaggtgggagccaactgtcagggaggtctttcccaccaaacatctttcagctgctgggaggtgaccatagagctctgcttttaaagatatggctgcttcaaaggccagagtcacaggaaggacttcttccagggagattagtggtgatggagaggagagttaaaatgacctcatgtccttcttgtccacggttttgttgagttttcactcttctaatgcaagggtctcacactgtgaaccacttaggatgtgatcactttcaggtggccaggaatgttgaatgtctttggctcagttcatttaaaaaagatatctatttgaaagttctcagagttgtacatatgtttcacagtacaggatctgtacataaaagtttctttcctaaaccattcaccaagagccaatatctaggcattttcttggtagcacaaattttcttattgcttagaaaattgtcctccttgttatttctgtttgtaagacttaagtgagttaggtctttaaggaaagcaacgctcctctgaaatgcttgtcttttttctgttgccgaaatagctggtcctttttcgggagttagatgtatagagtgtttgtatgtaaacatttcttgtaggcatcaccatgaacaaagatatattttctatttatttattatatgtgcacttcaagaagtcactgtcagagaaataaagaattgtcttaaatgtcaaaaaaaaaaaaaaaaaaaa

SEQ ID NO: 109 - DNA, 5182 bp, Homo sapiens
  Genbank Accession No. AL359061
ccacgcgtccgcccacgcgtccggtagacgaaaggggaggttatgacccacccacatacatcagggacctctccatccatcatacattctctcgctgcgtcacagtccatggctccaatggcttgttgatcaaggacgttgtgggctataactctttgggccactgcttcttcacggaagatgggccggaggaacgcaacacttttgaccactgtcttggcctccttgtcaagtctggaaccctcctcccctcggaccgtgacagcaagatgtgcaagatgatcacagaggactcctacccagggtacatccccaagcccaggcaagactgcaatgctgtgtccaccttctggatggccaatcccaacaacaacctcatcaactgtgccgctgcaggatctgaggaaactggattttggtttatttttcaccacgtaccaacgggcccctccgtgggaatgtactccccaggttattcagagcacattccactgggaaaattctataacaaccgagcacattccaactaccgggctggcatgatcatagacaacggagtcaaaaccaccgaggcctctgccaaggacaagcggccgttcctctcaatcatctctgccagatacagccctcaccaggacgccgacccgctgaagccccgggagccggccatcatcagacacttcattgcctacaagaaccaggaccacggggcctggctgcgcggcggggatgtgtggctggacagctgccggtttgctgacaatggcattggcctgaccctggccagtggtggaaccttcccgtatgacgacggctccaagcaagagataaagaacagcttgtttgttggcgagagtggcaacgtggggacggaaatgatggacaataggatctggggccctggcggcttggaccatagcggaaggaccctccctataggccagaattttccaattagaggaattcagttatatgatggccccatcaacatccaaaactgcactttccgaaagtttgtggccctggagggccggcacaccagcgccctggccttccgcctgaataatgcctggcagagctgcccccataacaacgtgaccggcattgcctttgaggacgttccgattacttccagagtgttcttcggagagcctgggccctggttcaaccagctggacatggatggggataagacatctgtgttccatgacgtcgacggctccgtgtccgagtaccctggctcctacctcacgaagaatgacaactggctggtccggcacccagactgcatcaatgttcccgactggagaggggccatttgcagtgggtgctatgcacagatgtacattcaagcctacaagaccagtaacctgcgaatgaagatcatcaagaatgacttccccagccaccctctttacctggagggggcgctcaccaggagcacccattaccagcaataccaaccggttgtcaccctgcagaagggctacaccatccactgggaccagacggcccccgccgaactcgccatctggctcatcaacttcaacaagggcgactggatccgagtggggctctgctacccgcgaggcaccacattctccatcctctcggatgttcacaatcgcctgctgaagcaaacgtccaagacgggcgtcttcgtgaggaccttgcagatggacaaagtggagcagagctaccctggcaggagccactactactgggacgaggactcagggctgttgttcctgaagctgaaagctcagaacgagagagagaagtttgctttctgctccatgaaaggctgtgagaggataaagattaaagctctgattccaaagaacgcaggcgtcagtgactgcacagccacagcttaccccaagttcaccgagagggctgtcgtagacgtgccgatgcccaagaagctctttggttctcagctgaaaacaaaggaccatttcttggaggtgaagatggagagttccaagcagcacttcttccacctctggaacgacttcgcttacattgaagtggatgggaagaagtaccccagttcggaggatggcatccaggtggtggtgattgacgggaaccaagggcgcgtggtgagccacacgagcttcaggaactccattctgcaaggcataccatggcagcttttcaactatgtggcgaccatccctgacaattccatagtgcttatggcatcaaagggaagatacgtctccagaggcccatggaccagagtgctggaaaagcttggggcagacaggggtctcaagttgaaagagcaaatggcattcgttggcttcaaaggcagcttccggcccatctgggtgacactggacactgaggatcacaaagccaaaatcttccaagttgtgcccatccctgtggtgaagaagaagaagttgtgaggacagctgccgcccggtgccacctcgtggtagactatgacggtgactcttggcagcagaccagtgggggatggctgggtcccccagcccctgccagcagctgcctgggaaggccgtgtttcagccctgatgggccaagggaaggctatcagagaccctggtgctgccacctgcccctactcaagtgtctacctggagcccctggggcggtgctggccaatgctggaaacattcactttcctgcagcctcttgggtgcttctctcctatctgtgcctcttcagtgggggtttggggaccatatcaggagacctgggttgtgctgacagcaaagatccactttggcaggagccctgacccagctaggaggtagtctggagggctggtcattcacagatccccatggtcttcagcagacaagtgagggtggtaaatgtaggagaaagagccttggccttaaggaaatctttactcctgtaagcaagagccaacctcacaggattaggagctggggtagaactggctatccttggggaagaggcaagccctgcctctggccgtgtccacctttcaggagactttgagtggcaggtttggacttggactagatgactctcaaaggcccttttagttctgagattccagaaatctgctgcatttcacatggtacctggaacccaacagttcatggatatccactgatatccatgatgctgggtgccccagcgcacacgggatggagaggtgagaactaatgcctagcttgaggggtctgcagtccagtagggcaggcagtcaggtccatgtgcactgcaatgccaggtggagaaatcacagagaggtaaaatggaggccagtgccatttcagaggggaggctcaggaaggcttcttgcttacaggaatgaaggctgggggcattttgctggggggagatgaggcagcctctggaatggctcagggattcagccctccctgccgctgcctgctgaagctggtgactacggggtcgccctttgctcacgtctctctggcccactcatgatggagaagtgtggtcagaggggagcaatgggctttgctgcttatgagcacagaggaattcagtccccaggcagccctgcctctgactccaagagggtgaagtccacagaagtgagctcctgccttagggcctcatttgctcttcatccagggaactgagcacagggggcctccaggagaccctagatgtgctcgtactccctcggcctgggatttcagagctggaaatatagaaaatatctagcccaaagccttcattttaacagatggggaaagtgagcccccaagatgggaaagaaccacacagctaagggagggcctggggagccccaccctagcccttgctgccacaccacattgcctcaacaaccggccccagagtgcccaggcactcctgaggtagcttctggaaatggggacaagtcccctcgaaggaaaggaaatgactagagtagaatgacagctagcagatctcttccctcctgctcccagcgcacacaaacccgccctccccttggtgttggcggtccctgtggccttcactttgttcactacctgtcagcccagcctgggtgcacagtagctgcaactccccattggtgctacctggctctcctgtctctgcagctctacaggtgaggcccagcagagggagtagggctcgccatgtttctggtgagccaatttggctgatcttgggtgtctgaacagctattgggtccaccccagtccctttcagctgctgcttaatgccctgctctctccctggcccaccttatagagagcccaaagagctcctgtaagagggagaactctatctgtggtttataatcttgcacgaggcaccagagtctccctgggtcttgtgatgaactacatttatcccctttcctgccccaaccacaaactctttccttcaaagagggcctgcctggctccctccacccaactgcacccatgagactcggtccaagagtccattccccaggtgggagccaactgtcagggaggtctttcccaccaaacatctttcagctgctgggaggtgaccatagggctctgcttttaaagatatggctgcttcaaaggccagagtcacaggaaggacttcttccagggagattagtggtgatggagaggagagttaaaatgacctcatgtccttcttgtccacggttttgttgagttttcactcttctaatgcaagggtctcacactgtgaaccacttaggatgtgatcactttcaggtggccaggaatgttgaatgtctttggctcagttcatttaaaaaagatatctatttgaaagttctcagagttgtacatatgtttcacagtacaggatctgtacataaaagtttctttcctaaaccattcaccaagagccaatatctaggcattttcttggtagcacaaattttcttattgcttagaaaattgtcctccttgttatttctgtttgtaagacttaagtgagttaggtctttaaggaaagcaacgctcctctgaaatgcttgtcttttttctgttgccgaaatagctggtcctttttcgggagttagatgtatagagtgtttgtatgtaaacatttcttgtaggcatcaccatgaacaaagatatattttctatttatttattatatgtgcacttcaagaagtcactgtcagagaaataaagaattgtcttaaatgtccaaaaaaaaaaaaaaaaaaaaaaaaaaaaaa

SEQ ID NO: 110 - DNA, 5776 bp, Homo sapiens
  Genbank Accession No. AB033025
gctcacccaggaaaaatatgcaatcgtcccattgatatacaggccactacaatggatggagttaacctcagcaccgaggttgtctacaaaaaaggccaggattataggtttgcttgctacgaccggggcagagcctgccggagctaccgtgtacggttcctctgtgggaagcctgtgaggcccaaactcacagtcaccattgacaccaatgtgaacagcaccattctgaacttggaggataatgtacagtcatggaaacctggagataccctggtcattgccagtactgattactccatgtaccaggcagaagagttccaggtgcttccctgcagatcctgcgcccccaaccaggtcaaagtggcagggaaaccaatgtacctgcacatcggggaggagatagacggcgtggacatgcgggcggaggttgggcttctgagccggaacatcatagtgatgggggagatggaggacaaatgctacccctacagaaaccacatctgcaatttctttgacttcgatacctttgggggccacatcaagtttgctctgggatttaaggcagcacacttggagggcacggagctgaagcatatgggacagcagctggtgggtcagtacccgattcacttccacctggccggtgatgtagacgaaaggggaggttatgacccacccacatacatcagggacctctccatccatcatacattctctcgctgcgtcacagtccatggctccaatggcttgttgatcaaggacgttgtgggctataactctttgggccactgcttcttcacggaagatgggccggaggaacgcaacacttttgaccactgtcttggcctccttgtcaagtctggaaccctcctcccctcggaccgtgacagcaagatgtgcaagatgatcacagaggactcctacccagggtacatccccaagcccaggcaagactgcaatgctgtgtccaccttctggatggccaatcccaacaacaacctcatcaactgtgccgctgcaggatctgaggaaactggattttggtttatttttcaccacgtaccaacgggcccctccgtgggaatgtactccccaggttattcagagcacattccactgggaaaattctataacaaccgagcacattccaactaccgggctggcatgatcatagacaacggagtcaaaaccaccgaggcctctgccaaggacaagcggccgttcctctcaatcatctctgccagatacagccctcaccaggacgccgacccgctgaagccccgggagccggccatcatcagacacttcattgcctacaagaaccaggaccacggggcctggctgcgcggcggggatgtgtggctggacagctgccggtttgctgacaatggcattggcctgaccctggccagtggtggaaccttcccgtatgacgacggctccaagcaagagataaagaacagcttgtttgttggcgagagtggcaacgtggggacggaaatgatggacaataggatctggggccctggcggcttggaccatagcggaaggaccctccctataggccagaattttccaattagaggaattcagttatatgatggccccatcaacatccaaaactgcactttccgaaagtttgtggccctggagggccggcacaccagcgccctggccttccgcctgaataatgcctggcagagctgcccccataacaacgtgaccggcattgcctttgaggacgttccgattacttccagagtgttcttcggagagcctgggccctggttcaaccagctggacatggatggggataagacatctgtgttccatgacgtcgacggctccgtgtccgagtaccctggctcctacctcacgaagaatgacaactggctggtccggcacccagactgcatcaatgttcccgactggagaggggccatttgcagtgggtgctatgcacagatgtacattcaagcctacaagaccagtaacctgcgaatgaagatcatcaagaatgacttccccagccaccctctttacctggagggggcgctcaccaggagcacccattaccagcaataccaaccggttgtcaccctgcagaagggctacaccatccactgggaccagacggcccccgccgaactcgccatctggctcatcaacttcaacaagggcgactggatccgagtggggctctgctacccgcgaggcaccacattctccatcctctcggatgttcacaatcgcctgctgaagcaaacgtccaagacgggcgtcttcgtgaggaccttgcagatggacaaagtggagcagagctaccctggcaggagccactactactgggacgaggactcagggctgttgttcctgaagctgaaagctcagaacgagagagagaagtttgctttctgctccatgaaaggctgtgagaggataaagattaaagctctgattccaaagaacgcaggcgtcagtgactgcacagccacagcttaccccaagttcaccgagagggctgtcgtagacgtgccgatgcccaagaagctctttggttctcagctgaaaacaaaggaccatttcttggaggtgaagatggagagttccaagcagcacttcttccacctctggaacgacttcgcttacattgaagtggatgggaagaagtaccccagttcggaggatggcatccaggtggtggtgattgacgggaaccaagggcgcgtggtgagccacacgagcttcaggaactccattctgcaaggcataccatggcagcttttcaactatgtggcgaccatccctgacaattccatagtgcttatggcatcaaagggaagatacgtctccagaggcccatggaccagagtgctggaaaagcttggggcagacaggggtctcaagttgaaagagcaaatggcattcgttggcttcaaaggcagcttccggcccatctgggtgacactggacactgaggatcacaaagccaaaatcttccaagttgtgcccatccctgtggtgaagaagaagaagttgtgaggacagctgccgcccggtgccacctcgtggtagactatgacggtgactcttggcagcagaccagtgggggatggctgggtcccccagcccctgccagcagctgcctgggaaggccgtgtttcagccctgatgggccaagggaaggctatcagagaccctggtgctgccacctgcccctactcaagtgtctacctggagcccctggggcggtgctggccaatgctggaaacattcactttcctgcagcctcttgggtgcttctctcctatctgtgcctcttcagtgggggtttggggaccatatcaggagacctgggttgtgctgacagcaaagatccactctggcaggagccctgacccagctaggaggtagtctggagggctggtcattcacagatccccatggtcttcagcagacaagtgagggtggtaaatgtaggagaaagagccttggccttaaggaaatctttactcctgtaagcaagagccaacctcacaggattaggagctggggtagaactggctatccttggggaagaggcaagccctgcctctggccgtgtccacctttcaggagactttgagtggcaggtttggacttggactagatgactctcaaaggcccttttagttctgagattccagaaatctgctgcatttcacatggtacctggaacccaacagttcatggatatccactgatatccatgatgctgggtgccccagcgcacacgggatggagaggtgagaactaatgcctagcttgaggggtctgcagtccagtagggcaggcagtcaggtccatgtgcactgcaatgccaggtggagaaatcacagagaggtaaaatggaggccagtgccatttcagaggggaggctcaggaaggcttcttgcttacaggaatgaaggctgggggcattttgctggggggagatgaggcagcctctggaatggctcagggattcagccctccctgccgctgcctgctgaagctggtgactacggggtcgccctttgctcacgtctctctggcccactcatgatggagaagtgtggtcagaggggagcaatgggctttgctgcttatgagcacagaggaattcagtccccaggcagccctgcctctgactccaagagggtgaagtccacagaagtgagctcctgccttagggcctcatttgctcttcatccagggaactgagcacagggggcctccaggagaccctagatgtgctcgtactccctcggcctgggatttcagagctggaaatatagaaaatatctagcccaaagccttcattttaacagatggggaaagtgagcccccaagatgggaaagaaccacacagctaagggagggcctggggagccccaccctagcccttgctgccacaccacattgcctcaacaaccggccccagagtgcccaggcactcctgaggtagcttctggaaatggggacaagtcccctcgaaggaaaggaaatgactagagtagaatgacagctagcagatctcttccctcctgctcccagcgcacacaaacccgccctccccttggtgttggcggtccctgtggccttcactttgttcactacctgtcagcccagcctgggtgcacagtagctgcaactccccattggtgctacctggctctcctgtctctgcagctctacaggtgaggcccagcagagggagtagggctcgccatgtttctggtgagccaatttggctgatcttgggtgtctgaacagctattgggtccaccccagtccctttcagctgctgcttaatgccctgctctctccctggcccaccttatagagagcccaaagagctcctgtaagagggagaactctatctgtggtttataatcttgcacgaggcaccagagtctccctgggtcttgtgatgaactacatttatcccctttcctgccccaaccacaaactctttccttcaaagagggcctgcctggctccctccacccaactgcacccatgagactcggtccaagagtccattccccaggtgggagccaactgtcagggaggtctttcccaccaaacatctttcagctgctgggaggtgaccatagggctctgcttttaaagatatggctgcttcaaaggccagagtcacaggaaggacttcttccagggagattagtggtgatggagaggagagttaaaatgacctcatgtccttcttgtccacggttttgttgagttttcactcttctaatgcaagggtctcacactgtgaaccacttaggatgtgatcactttcaggtggccaggaatgttgaatgtctttggctcagttcatttaaaaaagatatctatttgaaagttctcagagttgtacatatgtttcacagtacaggatctgtacataaaagtttctttcctaaaccattcaccaagagccaatatctaggcattttcttggtagcacaaattttcttattgcttagaaaattgtcctccttgttatttctgtttgtaagacttaagtgagttaggtctttaaggaaagcaacgctcctctgaaatgcttgtcttttttctgttgccgaaatagctggtcctttttcgggagttagatgtatagagtgtttgtatgtaaacatttcttgtaggcatcaccatgaacaaagatatattttctatttatttattatatgtgcacttcaagaagtcactgtcagagaaataaagaattgtcttaaatgtc

SEQ ID NO: 111 - DNA, 1272 bp, Homo sapiens
  Genbank Accession No. AL080214
cctggagaaggtgattaaagatacggagtccctgttcaaaacccgggagaaggagtatcaggagaccattgaccagatagagctggagttggccacggccaagaacgacatgaaccggcacctgcacgagtacatggagatgtgcagcatgaagcgcggcctggacgtgcagatggagacctgccgccggctcatcacccagtctggagaccgaaagtctcctgctttcactgcggtcccgcttagcgacccgccgccgccgccaagcgaggctgaggactccgatcgcgatgtctcatctgacagctccatgagatagagacctgcctcccccttgcacccgaggccctcgcagcagggagctcagcgaggcagagggtggggctgcacagaggggaacatcagctgcagctctgcaccaggccggtccctggggactggggcgctcctccctcaggctttctccctcagtcttggcttctccagggctctggggtgtctggagctaggcttggccctaccattctggggccatttccaccacagttggggctctcctgccttcacgcgtgggtgtctgctacttccccatctttaaaatgctgccagagcgattgcggcccctcaccttgtccacgtatcaggaatgtgaatgtgggacctttcctccatccctgttgtccggagccagctcactgtcttccacactggtgctaactggcccaggcactggagtggaatagaatgcagctggaggctacgcatggcctctgcagcacacgcagctggagagggcttctgtccctgtcagcggcagagggcgttggggctggccggggcaccttgtccctgctatggtccacatgctcacgctgtccacctgccaggtggagtgtatgtggctgtggccctccctcgtggaggtgccgtgctttaaagaggccttagtgcccgggatgggcacagtgttttgaagggaggtgggagctcttgctctcctggtcactgcagaatgacagagaaggtgaagctccatgcatgtgtgcgcgggtgtatgtgcgctcagggtctctgtttaagtatcagctaaagatgtgcttcctccgtgtctgtcatacactgagaccaacaggctacagtgtccctgattcttggaaaagcctggagaagctggggagatgcggttcacaatgcctcggtataggaggctgtgttgagctgacattcaaatggattctttaataataatgaaactggcgagtattaaaaaaa

SEQ ID NO: 112 - DNA, 1955 bp, Homo sapiens
  Genbank Accession No. AK000710
ctctagatgttggctatggaaaaagactttttttagaaaaaaatttcctcttgagccatcatgcacatctgactgcagccccagcgagcccttccttccttgtctgactgctcttcttctcgatttcttcttgttctgccttctcggtttgcagccctgacccccgctgtgtgtctggcccttggtgactgtccgtgtttctgttcctgtcattgtaactgtgacttttctctctgtctgcccccccttcctactggttcatgcttctcccccattcccaccctctctgcccggcctcccgctcccgccctttctcctcatgcacccggcctcgtctctgtagtctctgcacttgtctcccattaaggtcccatccatgggggggcggaagcgggagcgcaaggctgccgtcgaggaggacacctccctgtcggagagtgaggggccccgccagcccgatggggatgaggaggagagcacagccctcagcatcaacgaggagatgcagcgcatgctcaaccagctgagggagtatgattttgaggacgactgtgacagcctgacttgggaggagactgaggagaccctgctgctttgggaggatttctcaggctatgccatggcagctgcagaggcccagggagagcaggaagatagcctggagaaggtgattaaagatacggagtccctgttcaaaacccgggagaaggagtatcaggagaccattgaccagatagagctggagttggccacggccaagaacgacatgaaccggcacctgcacgagtacatggagatgtgcagcatgaagcgcggcctggacgtgcagatggagacctgccgccggctcatcacccagtctggagaccgaaagtctcctgctttcactgcggtcccgcttagcgacccgccgccgcgccaagcgaggctgaggactccgatcgcgatgtctcatctgacagctccatgagatagagacctgcctcccccttgcacccgaggccctcgcagcagggagctcagcgaggcagaggtggggctgcacagaggggaacatcagctgcagctctgcaccaggccggtccctggggactggggcgctcctccctcaggctttctccctcagtcttggcttctccagggctctggggtgtctggagctaggcttggccctaccattctggggccatttccaccacagttggggctctcctgccttcacgcgtgggtgtctgctacttccccatctttaaaatgctgccaaagcgattgcggcccctcaccttgtccacgtatcaggaatgtgaatgtgggacctttcctccatccctgttgtccggagccagctcactgtcttccacactggtgctaactggcccaggcactggagtggaatagaatgcagctggaggctacgcatggcctctgcagcacacgcagctggagagggcttctgtccctgtcagcggcagagggcgttggggctggccggggcaccttgtccctgctatggtccacatgctcacgctgtccacctgccaggtggagtgtatgtggctgtggccctccctcgtggaggtgccgtgctttaaagaggccttagtgcccgggatgggcacagtgttttgaagggaggtgggagctcttgctctcctggtcactgcagaatgacagagaaggtgaagctccatgcatgtgtgcgcgggtgtatgtgcgctcagggtctctgtttaagtatcagctaaagatgtgcttcctccgtgcctgtcatacactgagaccaacaggctacagtgtccctgattcttggaaaagcctggagaagctggggagatgcggttcacaatgcctcggtataggaggctgtgttgagctgacattcaaatggattctttaataataatgaaactggcgagtaaaaaaaaaaaaaaaaaaaaaaaaaaaaaaaaaaaaaa

SEQ ID NO: 113 - DNA, 2370 bp, Homo sapiens
  Genbank Accession No. AF124432
  unsure (1)..(2361): n = a or c or g or t
agagaattcggcacgggtggagaagcaactgcagcaagctctggaggagggtaagcagggccggcggggcctggggtcgtcgcgaccaggcagtgcagaccggcttcgtcagcyccatccggcccctggggcbkcagctgggcgcccggccggccgctgtctgcagccctttggagcgcgtkctgggctcgcccgckcgctccccggccggccccctcgcgccctccgcggccagcctctcgtcgtcctccacctccacctccaccacctattcctcgtcggcccgcttcatgcccggcaccatctggtcgttctcgcacgnccgccggctcgggccgggactggagcccactctggtgcaagggcctgggttgtmgtgggtgcacccggatgggtgggcgtccagatcgacaccatcacgcccgagatccgcgctctctacaacgtgctggccaaagtgaagcgngagcgngacgagtacaagcggaggtgggaagaggagtacacggtgcggatccagctgcaagatcgtgtaaatgagctccaggaggaagcccaggaggctgatgtctgccaggaggagctggcactgaaggtggaacagttgaaggctgagctggtggtcttcaaggggctcatgagtaacaacctgtcggagctggacaccaagatccaggagaaagccatgaaggtggatatggacatctgccgccgcatcgacatcaccgccaagctctgcgatgtggctcagcagcgcaactgcgaggacatgatccagatgttccagaagaagctggtcccatccatgggggggcggaagcgggagcgcaaggctgccgtcgaggaggacacctccctgtcggagagtgaggggcccgccagcccgatggggatgaggaggagagcacagccctcagcatcaacgaggagatgcagcgcatgctcaaccagctgagggagtatgattttgaggacgactgtgacagcctgacttgggaggagactgaggagaccctgctgctttgggaggatttctcaggctatgccatggcagctgcagaggcccagggagagcaggaagatagcctggagaaggtgattaaagatacggagtccctgttcaaaacccgggagatggagtatcatgagaccattgaccagatagagctggagttggccacggccaagaacgacatgaaccggcacctgcacgagtacatggagatgtgcagcatgaagcgcggcctggacgtgcagatggagacctgccgccggctcatcacccagtctggagaccgaaagtctcctgctttcactgcggtcccgcttagcgacccgccgccgccgccaagcgaggctgaggactccgatcgcgatgtctcatctgacagctccatgagatagagacctgcctcccccttgcacccgaggccctcgcagcagggagctcagcgaggcagagggtggggctgcacagaggggaacatcagctgcagctctgcaccaggccggcccctggggactggggcgctcctccctcaggctttctccctcagtcttggcttctccagggctctggggtgtctggagctaggcttggccctaccattctggggccatttccaccacagttggggctctcctgccttcacgcgtgggtgtctgctacttccccatctttaaaatgctgccagagcgattgcggcccctcaccttgtccacgtatcaggaatgtgaatgtgggacctttcctccatccctgttgtccggagccagctcactgtcttccacactggtgctaactggcccaggcactgagtggaatagaatgcagctggaggctacgcatggcctctgcagcacacgcagctggagagggcttctgtccctgtcagcggcagagggcgttggggctggccggggcacttgtccctgctatggtccacatgctaacgctgtccacctgccaggtgagtgtatgtggctgtggccctccctcgtggaggtgccgtgctttaaagaggccttagtgcccgggatgggcacagtgttttgaagggaggtgggagctcttgctctcctggtcactgcagaatgacagagaaggtgaagctccatgcatgtgtgcgcgggtgtatgtgcgctcagggtctctgtttaagtatcagctaaagatgtgcttcctccgtgtctgtcatacactgagaccaacaggctacagtgtccctgattcttggaaaagcctggagaagctggggagatgcggttcacaatgcctcggtataggaggctgtgttgagctgacattcaaatggattctttaataataatgaaactagcgagtatttattttgcaaaaaaaaaaaaaaa

SEQ ID NO: 114 - DNA, 172570 bp, Homo sapiens
  Genbank Accession No. AC006064
  unsure (1)..(172570): n = a or c or g or t
ggatcaacttgaggccagcctgaccaacgtggcaaaactccatctctactaaaaatacaaaaattagctgagcgtggtggcacgcacctgtcatcccagttactcaggaggctgaggcgtgagaatggcttgagcctgggagacagaggttgcagtgagctgagattgcatcattgcactctagcctgggtgacagagtgaaatggagggaggaaaaaaaaaaaaaaggaaggtcccgtccagggagccagcctaggatggggaaggctcaccagaagtggatgcaaagagtgctggagatgagctcattctatttgcctaggaaagaaaaacgtccagaaacctggccttcctcctcttggccgaggccctccaggaaagccaggcagaccctgctcctgctctgaccccctggagaagtgatatgtagaaaagaggagatgggctttggcccagaggacagcagcgttaggctagtgagcagttcccagtcggttcaaggttgctaggctcagcgaactgcaagtccctgttcgacaagtttcttcctaaaggtccccagttcctcatgattcttctgagggtctcatccaccctcccagggcctgcagtcagctagccaccccactgccccatgcctgcagtgaagacatttaccacaacctggaaatggctggtgacagaaaagtcctcagggccacagcactctctgcggtgggaattcaggtgccttgcctgatggtgacaaggctggttttgcataaacagctctctgaatcacacccagatgtggcttctgacttgagtggacccccatgaagagctgcagagggggctgggaaaagacaagagaatggagaaaatgaggagaaaggaaactacagagtgagatagagaacagatctgacaggtgtgaccacagcagtgtgacatttatgaacagtgtggaaacaacggcaaagcccctgaattaaaaacttcctggggaaataagccactccacatatcggttgctgaggaaagagtggaggaggctgttgacccgtgtgtgtccccatgactcaaagagggaaaagtctagctgtttccaatatcccgaaatcagtcttgctgggagaactgggaaaataaaaaagagatgacccccgtaggaagctacctttaatcccaagtgcccaaggctaggagagaagatgctccaggcgatccaggacaccagtgactgacacagccagaggtgggaaaggggaggataaagatggcacaaaagtgaggagtgagcaagggtctgagagggaaggccatgtgggcagtaggtggcacccacatcagagactgacatgaggattaaaggagagcataggtgatcggtcagagtgtgacagaagagaggcagctctacaccccttgcttgcaattctgagcattctgtagcaaactcgtttggccatcaaaccagacctcaattgagacaaggctatttaagcttcctcccagttggtgtaaatattcaatagttttgctgcagaaatgttgcgtttgattatgagactaccccaactccccaagggtgttttgtggtgctggtttctgtataaacctgaaaaattctgaattccaaaacttatctgacccccaaagtttcagataagagcttgtggacctgtgctcaattctggttctccttccttctttcaactgttgtctgtgaaaggagggatgcaggtatgggagacaggagtcctgcgaattcgtctgtaaactgtggacgggggggtgggtggggggggtaacgtgggcacctttgtgcacaagtgcatgaataggaggggtgagcaactgtgtgtccatcacctttttgtcaaagaagcaggagtcagtgggctacgtgcttcatgagcaggagaggcggaaactaaggaaggctcatgtgttggaggaagcatgtttgaagagcagcaggtctcacagagtttgctctttaatactctccccagcacacggaaggggaagggggtggaggttgctgctatgagagagaaaaaaaaaacagccacaatagagattctgccttcaaaggttggcttgccacctgaagcagccactgcccagggggtgcaaagaagagacagcagcgcccagcttggaggtgctaactccagaggccagcatcagcaactgggcacagaaaggagccgcctgggcagggaccatggcacggccacatccctggtggctgtgcgttctggggaccctggtggggctctcagctactccagcccccaagagctgcccagagaggcactactgggctcagggaaagctgtgctgccagatgtgtgagccaggtaagagggggccttggtaagggccaggtgactggcgaaagagagaggactggggttaatacagtaaataggcgcagggtgagactgagctcaagcaaggagggaaatcctgcagctgtggggaggcaccaccttgaagagggcagagaaccagcccttctcaggccttgatcccttaccctctcctcccaggaacattcctcgtgaaggactgtgaccagcatagaaagactgctcagtgtgatccttgcataccgggggtctccttctctcctgaccaccacacccggccccactgtgagagctgtcggcactgtaactctggtgaggtgggcaagggtgtgtaggtggggacgatggacaagcatctgggggagcaaggctggtgacgggtttgggggtgcaaggaggatgacggggccaaagctttggccttcttcaaggctcacagcaagtggagccaatgctgggaaatgcggcaccctaggtggggcatgaattaacgtgggcagacatctagtattccaggaaagggataaatagaatttgagggattggtgagaacgggtctatggataggatcaagacaataaaatgagagaagtggctctatgaccccagatttcgggcaagcaacccccaaccaataaactgactgtgttcccagagtgcacatgtgcaggttggccattgggaatttggaatacatctttctaaggaaataacaaagcaacccaataggtaacaacctttttttgcacaaaagccaatttgagaaaatgagtatgtatgtagcctgtgtttttattttatagttccaaaaaaaaaggttttttttaaactaagaagtataatatctgcagttgtgcttatgaatgctgttattatttctccatcttcgctacaatttcagaaactacggccagtatacactagaatagcaggctttaaagtggcccctttgaacaaatgttctctagcaagacactttttagaaccaggtaactgtaactattaaactacctacttgcaaaacgtgtttggtgtcactgggtctcttggtactgggttttgttttgtttagtttagagacaaggtctagctctgtcacccaggctggagtgcagtggtgcaatcatagctccccacagccttgaactcctgggctcaagcaatcttctagtctcagcctctgaaagtgccaggattacaggtgtgagctgtagtgcctggtcccgtaaaaacaaaaacaaaaaccaacaccagatgtggtggctcatgcctataatcccagcacttgggaggccaaggcagaagggtatttgcatattttgtagagacttgagcccaggagcttgagaccagctgggcaacatagtgagaccttgtctctaaaaaaattggctggtcatggtagtgcacctgcagtcccagctacttgggaggctgagatgggaagatcacttgagcccaagaggtccccaagaggtccaggctgctcacatcactgcactccagcctgggtaacagagcaaaaccctttttcacacacacacacacacacacacaaaaagccagagcagtggctcacacttgtaatcccagcactttaggaggccaaggcaggcggatcccttgagcccaggagtttaagaacaccctgggcaacatggcaaaaccctgtctctactaaaaatacaaaaagttagccaggcgtggtggcacgaacctgtagtcccagctactcagaaggctgaagtgagaagatcacttgagtccaggaagtggaggctgcagtgagccgtgactgtaccactgcactccagcttgggagacagagtgagcagagtgagaccctgtttccaaaaaaaaaaagaaaacaaaagcttttccattgcaaatcaaccaaaaaggaacgtctttaatacacaagaaatattcttcagtctacttaacttaaaaatgtaactgtaatagatgcttttctcttgacagcggccccggcagggttggaacttttcctagtcaaaacccccctactcactctgcagacccttcctgaaggtcttcgccccatactgagcccatcttcagtcccttcacttgttccaaactagcccaatccatgacccttctctgggagctcagccaatagatcccaaagtaccacagcagcacctggctgcagaaggacccccgggaaatgcagtcaggggtgagaagatgggtgggctgaatgagctcggccctctctgggccttagtgctggcatctatgagatgaggacatgcctgaagtcagcctggaattttgagcccaggttatacctggtaaatagaactcccaggtctccggatactcaccactaaaacaatagcacctcattgtttttgttttgttttgttttgttttttaattatactttaagttctagggtacatgtacacaatgtgcaggtttgttacataggtatacatgtgccatgttggtgtgctgcacccattaactcatcatttacattaggtatatctcctaatgctatccctcctccctccccacaccccacgacaggccccagtgtgtgatgttccccttcctgtgtccaagtgttctcattgttcaattcccacctacgagtgagaacacattgtttttaaccctccccagcagcttctttaacccctccatttcccttttggcggagacccttgtcatcactcctctctaccaccagtgctctcccctcctgcactgtcccaggcttcctcattcttcccttgcaggtccttatccaacatggctcacaattcctgggaagccacaaggaaaccaaattctagtagcaactcagagtcagcattcattagcaggtcacagggccataaggatgccaagaaggaatttgtccctctccttgtcctgacaaaaggcataagtagaagaaaattgttaggtttggttatgacctttgacattctctctttgacatcctccctttctgcacccctcttccacctgtcagggcacctagggctccccgggtccccacaagtgtctgccctaaggcccaccaggctttcttgcagcctgtcccacatctgggtgtcactgccttcctctgaatcaccctcctctcaaaccagccgccagcgagcccagcccagcccagctagtgccctaccacacccgcccccaggataattaacacccagccacccagcatcggacctctacacttgagcaaaatgtatattttaaaggcaaattctcacgcctataatcccagcactttgggaggccaaggcgggcggatcacgaggtcaggagattgagaccatcctggccaacacagtgaaaccccatctctactaaaaatacaaaaaattagccaggtgtggtggcacacacctgtaatcccagctactagggaggctgaggcaggagaatcacttgaactcaggaggcggaggttgcactgagccgagatcgtgccactgcactccaacctgggcgacaaagcaagactctgtcaaaaaacaaacaaacaaaataaaggctaagtaactgtaatcaagtaactatttattatttatttattttagtgtatccacaggttgtgcagccatcaacactatctaattctataacattttcgttaccccagagaaacttgtaccccttagcaatgactccccatttcttccccccaaccaaccccagccccagccccagcccctgggaatccctaatatactttgttttgttttttgttggtggtgtttgagacaggatctcactctgtcacccaggctggagcgcagtatcatgatctcagctcactgtaacctccacctcccgggctcaagcgatcctcccacctcagcctccccagtagcttgggcctacaggtgtgcaccaccacacccagctaatttttgtattttttgtagagacggggtttcaccatgttggccaggctggtctcaaactcctgagctcaagcaatccacccacctcaacctcccaaagtgctgggattacaggcgtaagccactgcacctggctattttctttctttcttttcttttttttttttttttttgagacggagtttcactctgttgcccaggctggagtgcagtggcgtgatctcggctcactgcaacttccacctcccgggttcaagcaattccctgcctcacccggctattttatatttgttgatctgctgctggttatgcctgtgagccaaatttgtacaaattcttaagctttacaatcatgcgtgcctctctgtacgtatattatactttaattaaaagttattaaagtattggggccgagcacagtggctcacgcctgtaatcccaacactttgggaggctgaggctggtgcatcacctgaggtcaggagtttaataccagcctggccaatacagtaaaaccccgttgctactaaaaatacaaaaaattagccgggtgtggtgacgggcacctgtaatcccagctacttgggaggctgaggcaggagaattgcttgaacccgggaggcagaggttgcaacgagccaaggtcacgccattgcactccagcctcggcaacaagagcgagactccatctcaaaaaaataaataaaaaataaaaaatgtatcagggagtacaagagaaagtcatataagctctttctacttttcatggtttctatgtctgaacccatgaatcttccttctgaaaggtccaactttcttctttaataacaataataatggcaaaggcattgggggaccgtgagcaaagggcaggcctttgcaggggtgggaatggaaagggaagcacgtccctagaggtgggcctgggatgggggttgggggatgaagcaagtggaccttgaaggtctccacaggtctgagtgtcctatgctccctgggcctctcttcccccaggtcttctcgttcgcaactgcaccatcactgccaatgctgagtgtgcctgtcgcaatggctggcagtgcagggacaaggagtgcaccgagtgtgatcctcttccaaacccttcgctgaccgctcggtcgtctcaggccctgagcccacaccctcagcccacccacttaccttatgtcagtggtaagttccaggcaactctctgtgccatcacgtggggtagcggtgataccccaaccagtactccccactcctacccctagataaggtcagcctgtttctgccttcccatcccatccagcacctctcaggccttcagatgtgccctatggggtcccctgctgctactcattctgtctctgtttttccagagatgctggaggccaggacagctgggcacatgcagactctggctgacttcaggcagctgcctgcccggactctctctacccactggccacgtgagttttctccttaatccccaccgctagagagaatgcatacacgaggggccaggagggaagccagacagaaagctcctaggattagggataagaggaggggaaaaagcagagtccactgtttaggagaggagttggccaacggtggcgggtgggatagaataaggtgggggaaaggggagaggcaaggtgacaggagggctgggctgagggagccaagggctagaccctcccctaacccctgtgtgtcccctcctattacagcccaaagatccctgtgcagctccgattttattcgcatccttgtgatcttctctggaatgttccttgttttcaccctggccggggccctgttcctccatcaacgaaggaaatatagatcaagtaagagacagaacacaggcctccggtcctgcccctgcaccacaccccactggctcaaccccactgcccacgcctggaatctcactgaaacccaccagctccacttcaccagccttggtcctaccccttctctccccttagctggcgtgctcctgacacccctcccccaagcgcacccgcctctacccatctccttctcccgtctccccctgcccccactgctggccaagactcatcggatctccttctgcagacaaaggagaaagtcctgtggagcctgcagagccttgtcgttacagctgccccagggaggaggagggcagcaccatccccatccaggaggattaccgaaaaccggagcctgcctgctccccctgagccagcacctgcggtagctgcactacagccctggcctccacccccaccccgccgaccatccaagggagagtgagacctggcagccacaactgcagtcccatcctcttgtcagggccctttcctgtgtacacgtgacagagtgccttttcgagactggcagggacgaggacaaatatggatgaggtggagagtgggaagcaggagcccagccagctgcgcctgcgctgcaggagggcgggggctctggttgtaaaacacacttcctgctgcgaaagacccacatgctacaagacgggcaaaataaagtgacagatgaccaccctgcagctctccagcttcctctctgaaatcccagtcccaaaatccagtttcctggccgcctcctggctcaggtcaggatctggcagaggaggtttctcagccggttatgttggggcctgcttaagggcgggggtgagaaaggtccccaggctactgtggatcctgtgtctgacttcagatccccttttcccacagttatagctccacttttttgggacaggtggggagcaaaagggtgcagaggtcaggtcttgaaatcaccaggggatttccgggtgaggtgggtggtgagaaaggaaacagcaagcagggctctggcagctgctgcagacggcttcacacagggacgcgggctgccatcttgctctaagtgaaagtgaaagaaaagtcggcagcagagggaacagggaagaaacctaaaggctgcaggctgccaggtgtgcttggagagcccccttcttccgccgggcctcgcaagcagcgtaggactgtggagaagggcggtgggcaaggagggaactcgagagcagcctccatgggcacacaggagggctggtgcctgctgctctgcctggctctatctggagcagcagaaaccagtgagtctgggagtcggggagagctggctgggagaagagctactgaagccccagggtgccaccctccccgagattccagaagagcaaaggggccggggatgaccccatcgccttctaagcccaacgggaaaggctcagcggctggcaaaggaaggaaccaatagtgtgtgtggagggagggtggggactccacagggaaaatgctaaagaggggctgcctctgtggctgtggtcaggagccactgtcctacagagagggcactggcctgggagctgacacttcagaagaggaaaggactccccaggtgaggaaatcacttggaaggtgaccttgaaggcgggggaggggaaggctacccgaaatgggagaaagcagtgcaggctgtcagtgccccagcaacagtaactgtccagtctcctctctctgcggtggcacttgcttgttttctgagaattcctttgactgaaaagatagtcttttattcaacagttggaaatgcaagcataaactcctctgagcaaggcaaatccaggactttaactctcaccaagaagtatttgcctggactagcaggtgctctccagaaagctggtttggggatgacgggagaatagagggacacagaaacagctaggatcttggatggcaacttttaccctttgatgactccacagcttgagggcgggggcaggaagcaagtgtggagtagctttctggggaaggcggtgctcaccccagcctttgtctgcagagccccacccagcagaggggcagtggcgggcagtggacgtggtcctagactgtttcctggtgaaggacggtgcgcaccgtggagctctcgccagcagtgaggacagggcaagggcctcccttgtgctgaagcaggtgccagtgctggacgatggctccctggaggacttcaccgatttccaagggggcacactggcccaagatgacccacctattatctttgaggcctcaggtaaaagccttccacctgtgtccttggtcctcccgggctccctccaccaggacagcccaggtcccgattacagccacacatactgcctcccgttggccctggtgttctcacgctaatttgccctctgtgtgtgccctgcttctccccagtggacctggtccagattccccaggccgaggccttgctccatgctgactgcagtgggaaggaggtgacctgtgagatctcccgctactttctccagatgacagagaccactgttaagacagcagcttggttcatggccaacgtgcaggtctctggagggggacctagcatctccttggtgatgaagactcccagggtcgccaagaatgaggtgctctggcacccaacgctgaacttgccactgagcccccaggggactgtgcgaactgcaggtaagaaaatgaaaagcaaggccaggtgtggtggctcacgcctgtaatcccagaattttgggataccgaggtcggtggatcacctgaggtcaggagtttgagatcagcctggtcaacacggtgaaaccccgtctctactaataccaaaattagccgggcatggtggcgggtgcctgtaatcccagctacgagggaggctgaggcaggagaatcgcttgaacccggaaggcagaggttgcggtgagccgagatcacaccatggcacttcagcctgggcaacaagagcgaaactccatctcaaaaaaaaaaaagaaaagaaaagaaaagcaagtcacagaaagttttgcttttctaaagtggtaagatatgggggacagaagaagaaagggaacaaatccacctccatccacactggtcacctcagggcacccctaggccttggtcctttcttcctaaaaacccctgagtcaggccaggtgcgaaggcccatgcctgtaatcccagcactttgggaggccaaggcaggtggatcacctgaggtcaggagttcaagaccagcctggccaacatggtgaaaccccctctctactaaaatacagaaattagccgggcatgatggcaggtgcctgtaatcccagctactcaggagactgagacgggagaatcacttgaacctgagagacggtggttgcagtgagccgagattgcgccactgcactccagcctgggcagctgagtgagacaccgtctcaaaaacaacaacaacaacaaaaaccctgagtccacaagagaatgcttcgcagcccctacctgaaggtccccaggcacacagacaacctgtgttatttccaaaatggagatcgttctcatctcactgggctgccatgaggaaataagacacatgatgctattctgtacatgggtgctgtccactgtagtcttatcgagccaaaacccggttttctgccagtgaaatgctaggctgctctggtgcttcaggggtaaagctcagggatgcatcatttgttcatgatcttattagtaaacccagtacttgccctctccagctcagcacatcctcgagggcacaagaaattgagaacatgatgacagggttccccagagcccattaatccaatactctgtgccctgcttctttgagtctccaagaagaaacagccaagtccagagaaaattaggggcaaccgtcctatccttggaaaaccccagaacactctaacctctctgtggtccaacctaaatctatcctgacccattagaaaaaggtcttcatgtctgtccagtgtctaccatactcctggcatgcataggtatttctctctttttattccaaacctacaaaaaaaggtgaaataataatataatgaacacctatataccctacacctagatccaccagttgttaacaatttgccacattctctctcccccgactcctcatgtgtgtatatgtgtacgtgtgtattttcctctgaactgagagtaagttgcagaagataacacttgaaccccaaacgcatgtttgaaccccgaaacgcatgtttgaaccccaaatacatccatagcatgtattagtttacaatgaaggacaaggatgtaatccttcatagttacaaagccatcatgtcagaaacaaaccaaagtggggaagtagtctacccgtagcgcaggcaataagggagtgcagactgtaaaatatttcagaacaaaaataaaatcagctaaaagtcagatggctttatagtctcaccatctcccgacactggcaattctgaatattatcagtgataaaatactcctctctgctagggcagactgtccctatctccccacacgactgcctagtatgccacagatcttcatacttttagatattttttaattgatatgataatagtctcaactataaagtccagggcatggtggtgcacacctgtagtccagctactcaggagactgaggcaggaggattgcttgagcccaggagtttgagtcctgtctgggcaacatagagagcgagaccctcttttttttttttaacagagtctcattctgtctcccaggctggagtgcagtggcatgatcttggctcactgcaacctctgcctcccaggttcaagtgattcttgtgcctcagtctcccaagtagctgggattatagacgcccgccaccacaccagctaatttttgtatttttagtagagatggggtttcaccatattggccaggctggtcttgaactcctgacctcaggtgatccacccatctcggcctcccaaagtgttgggattacaggcgtgagccactgtgcccaacctaagacccttctctttaaaaaataattaaatgtctccaaattcaaatttctccacttgtcccaatatttttttttttactgctttctttttctaagtacacaattcaaacaagaatcatgcagtgcatttagttgtgctgttccttgttttaatctagaacatgtttcatagaattgacatttttgaagggtccaggctagtggtcttgtagagtatcccaacatttagatttgtctgattgttttcctcatttcctcatgactggatttaggttaagcatgtttggcacagatactactatcacatgcttttttttttttttttcgatatggagttttactcttattgcccaggctggagtgcaatggctcgatcttggctcaccacaacctccgcctcctgggttcaagtgattctccacctgagcctcccaagtagctgggattacaggcatgcgccacgacacccagctaatttttgtatttttagtagagacggggtttctccatgttggtcaggctggtctcgaactcccaacctcaggtgatccacccgcctgggcttcccaataccacgtgtgtttttttgttttgttttgttttttacattttttttgagacggagtttcactcgtcgcccagactggagtgcaatggcgcgatcttggctcactgcaacctccacctcccggattcaagcaattctcctgtctcagcctcccaagtagctggaattacaggcacctgccaccatgcccggctaatttttgtgtttttagtagagacagggttttaccatgttggccaggctggtctcaaactcctgacctcaggtgatccacccacctcggccccccaaagtgctgggattaccggcatgagccaccgcacccagccaccacgtactttttaaactattgtttctagtcttcacagcatccttgcttaagcaggtgagcttggtaacaccaagtgacttgtcaaaggtcacggagccagtaagtggaacaaccagggtttcagagctttttctgctactctagtagttcttacctgaagattgatggtaactcttaattttgcatgtgtatttttcctggtgggagatccatagctttcactaaattatcctagagtaagtgatcccaaaatggtgatggccatcatgtgtaccatgctacctttccagagccccatttctttgtggttccatgtgatggaaaataagctcaaccggcctgtcaggcgaggaagaggcaggtgtatgcccacaacatgcccacagcttggagatcaggtgacctcaaggaggaagtagcccacaaatcacccctcttttcctcttcacagtggagttccaggtgatgacacagacccaatccctgagcttcctgctggggtcctcagcctccttggactgtggcttctccatggcaccgggcttggacctcatcagtgtggagtggcgactgcagcacaagggcaggggtcagttggtgtacagctggaccgcagggcaggggcaggctgtgcggaagggcgctaccctggagcctgcacaactgggcatggccagggatgcctccctcaccctgcccggcctcactatacaggacgaggggacctacatttgccagatcaccacctctctgtaccgagctcagcagatcatccagctcaacatccaaggtgaggccaggacatggttatcccagggaaggggatataacatgtctactgggagcgtttccagattgggacccaaatgcaagaatgatttcctgagaagcaggcttcaatcccacaacttaaatgccatcttcaccatggaagcacagatggcatcagataaggagtcccgttggactccaggataattccaccaagagatttccagcccaggatcctgctgccctgctgtggctggctgtctccatcaccccagtccttttggaccacatcctgaggagcagcagcagcaaaccaaggcagagcagtggaagcggttctgaccattatcactgctatcctttaaaatctctggcttagaggccgggcgcggtggctcacacctataatcccagcactttgggaggcggatcacgaggtcaggagttcaagaccagcctggccaatacggtgaaactccgtctctactaaaaatacaaaaaatagctaggcatggtggtgcgcgcctgtagtcccagctactcaggaggctgaggcagaagaatcgcttgaaccccggaggtggaggttgcggtgagccaagatcatgccactgcactccagcttgggcgacagagcaagacaccatcttaaaaaaaaaaaaaaaactggcttagaatgacagtaagaagccagccaatctttagttggctttactatctgttttctggaaaatgtaaccctgcccccttacggcctgcatccaggtgggcccctcacacacccccgccttggtacaccaccaagggacactgtagcctccacaatctactctcatcttggcaggaagaaaaggcttcaggctcctccgctgtccccagttagatccatgtgtaaccttattcctcattctttctccagcttcccctaaagtacgactgagcttggcaaacgaagctctgctgcccaccctcatctgcgacattgctggctattaccctctggatgtggtggtgacgtggacccgagaggagctgggtggatccccagcccaagtctctggtgcctccttctccagcctcaggcaaagcgtggcaggcacctacagcatctcctcctctctcaccgcagaacctggctctgcaggtgccacttacacctgccaggtcacacacatctctctggaggagccccttggggccagcacccaggttgtcccaccaggtactgggagtgtcctccttttccccacctccacactagggctcatggctctcctgccccagctcatctatggccttgttctgctgcccatccactttgttcgcagccctggcttcatgctcctgcctctgctcctgactattttcccaaggcggcagctgccacagcttctaccacacatcccctgagacttcattatactccagcctccagggtgtcaggcaatgtgcttaaggctggagatcacagatgaataattcctgatcatgccctccaggagcttagtccagtaatagagacaagactaagtagacagagaagatggcatttgagccaagttaactagcttagagggaagggaacactcaagatagaaacaatagcatatatgaaagccaaatcataaaacagcctaaagagaatttggagaattgcaagtaattcagcacagctagagcctagggtatatgggaaaaagggaaagtggctctgaagcttcggaggtaattctatttattgagcatttacatgaatcaagcagtgtagaaagcacttaaatgtatgatttcatggatcatgactcccattttacaggtgagtaaactggcacttgcagatgtcaatgaatttgcccaaggtcacctatcaatcaatggtaaagagagaatgtgaaaaacaggcaaccggattccccttacgggcttaattaaaccctgtagatctcactgggccttcaagctggaacttcctgagagccatagcatgctgttgaaaggttttatttatttatttatttatttatttatttatttattttattttattttactttttttcgatacagaatcttgctctgttccccaggctggagtgcagtggtatgatctcagctcactgcaacctccatatcctgggttcaagccatcctcttgcctcagcctcccgagtagctgggattacaggcgcgcaccaccacgcctggctaattttgcgtttttagtagagatggggtttcgccatgatggccaggctggtctcaaactcctgacctcaggtgatctgtccgcctcggcttcccaaagtgctgggattacagatatgagccaccgcaccctgcctgtcgagaggttttaagcaggaaagggacaggaaagaacccgcaacttgaagtggaaacatccaggagcactgggcattatttggttgctcattagactgtgaacttccccaaaactgaggtttcacttcagctcacatcattccccaactatttacaaaatcccagttaactggtggttttttgttttgctttgttttattttgttttgttttgagatagggtctcactctgtcgcccaggctggagtgcagtggcacgatctcagctcactgcaaactctgcctcccaggctcaagtgattctcccatctcagcctcccaagtacctgggaccacaggcgcacaccaacatgcccagttaattttttgtattttttgtacagacagggtttcaccatgttgcccaggctggtctcgaactcctgacctcaggtgatccacctacctcagcctcccaaagttctgggattacaggcatgagccactgtgtccaggcaagttaagtgctaacaaataaacccacctaaatctcacttgcaaagcaatttttaaaaccttgtccttaggtgggaagaggtagagaattctgtgtggagtaactcacaagtatccagcaaccttgaataagaacaaatgctgctgagtgccttgttccaggctcctcaaccagggactcacacacacaatccttagctcctcctccctggggtggacactgcaggtgagggctcagctcatgattcctgtgcacgatgatccccgcccacgttgctctcacctacagagcggagaacagccttgggagtcatctttgccagcagtctcttccttcttgcactgatgttcctggggcttcagagacggcaaggtaagagcctgggtgcccttggctctggccctggcccacctcacccactctaaccacctccccgcccagaccagggtggaagcccagatgccccaagctccagccacccacccatcacagcctcctgcttttgagtttgccctaaatgaaaatgaaaccagtcgtgttccctcgttttctcctagctacctcactaaagtctgtcactctcctgcctcagagtagaaagaaagagtagtcacgtgctcccagaaggactctaagtcaagtcacagagctaaaaatacatgaaggtggcaccagctcatggggcactgggcctggctctgcagaggcctctgccttccttcactgtgcaccctgggctcatgcaccaaggcagagaacaggaagaagtgaggggacaagaagaaggcagaatgtccagatggaggttaagaccaaagagccaggttggtggtgtgacggtaggaaaacaaagctggaggaaatggagaaggaacaagtgagggacaatgaggcatgggttggggctgggctacccctcccaaactcagctctgtcaaaataaaaggcccttgtgtctgctgcgaccaagcttttccactttcctgtctttctccacactggtcccaactgagccctgtcaccaagcctagcggctccaacttgcaaagtgtttaagtatgaaacaaaggccctcagaggcacccccggggctccatctcagttgcacctcagctgcaattagggttctgctccctcgggtgactgctgggaggttcaggatacctgcaaatgcctcactccctcagctgcaaggagagacttctcctttttattcgtttctaaaatgtgcctgatcaatacggtggaactcagcataccaaaactgtacgtgaggatgatggggaaaagggggtaagggggtgttcactgacagccttatctgggcacatcccctgggacaggacaagcaggccaaggacctaggaaggagcacaggaggcagatggaagaggcctgagggaacctgtgcttgtttgccagtgtgagatgcccacgcaacttcctgtcttcacttcctcttaccagcacctacaggacttgggctgcttcaggctgaacgctgggagaccacttcctgtgctgacacacagagctcccatctccatgaagaccgcacagcgcgtgtaagccagcccagctgacctaaagcgacatgagactactagaaagaaacgacacccttccccaagcccccacagctactccaacccaaacaacaaccaagccagtttaatggtaggaatttgtattttttgcctttgttcagaatacatgacattggtaaatatgccacatgcctttggtggaagtacaactgttgttattactctatacaagtatgagatcagggttaggaaaaaaagacaaagaggtgatgacagacacacagtggaaaccccacatcgtctcatggcaaaccgaagaacgggatgtgggaagctcagcttcatttgactgcaaagtcccagggttttgttgcacatttgctcatgcacatgggtggtgggaggaaagggggatagcaaagacacacagaagagggtacagggtgggtgagaaagaaagtagaagggctaatacccccaaagaacaaggccaactacacctggtgagcctcagagggacagaaacccaggaatgattcctgtgatagggctgggagagccaagaggacggattcgctccaggcttgggacacatcgaggacagtggtggttcttctccagcggtgaccccctgcattaggcaaggaggagcccagaggagagtggagaccttcgaggggggccgttgggagggtactgactgctttcttccagctcttcagtcccgcccttgggcaggacgaagggaatgtgggaaacaagggcgaagggaaaggaaggatggttttgagcaatgaaatgctgctgcatggaaagtgggcatccagaccctgcccagcatggcctcagcctcttcctgttcgtggaccgagggaagaaggaataaagggccatgggcattctccgctctgctcccagcctgccctcctccccttgcacctgggcttatcccacattaatagcccatcctgaagctcagcaattgccccgaagataggctgagcagatcccatcctcaggttccactgtctatacacacaaaccatgcaaagaggaggaagagaaaggaggcaaagtagaattcagacaggaaagggtggttcaaaggggaatatactacaggaagaacagagaggcggctctcaaggagagggccccatgacagcacagcaatacacaagcacacctgacacaggctggcacgcctccccccaaggtggggctggtgggtctacatgacttctctgcatcctgaggatcggccgggcctcaggaagaacctcttgcctcatccctgtctttggcaactgcacgggtggtgtggaggaaaggattccatgggtgtccaaagatctcacactgctaacaccctcacgctccttcatcaacaggaagagaggaacaggaccctctttaacgagggcaaggagtggcttcctctgagcttgttactttcaaattaagcacttgactcactgtttctctataactaacaggcaatctctctctttatgccaacaattaactgggagctaggttaaattatttggctagataaaactaccagctagatggatttatttggtgccctcatacagaatgctgtagaaaatgtaaagaagagaaagctccttccagctagaagcacatgggactgcttctaggatggaaacaagtcctgctattttcacaatccctaagtgttctccaggcctctggagaacaaagtaaagttgtaagatccccaaagacacggaaaatcctggacgaacagattagaagtaactacaaaaaacaagtttttactttcgaaaagggtactgcactgaaaccaagttggactttggtccacccccaggaccctctccaggcctggtccaggaaggaaagctccacatgaccaggcagtactgagtgagctgccatcttcccagcccctccctagctcctaccagtggccaggttttctagaagtcaccatgggcaccgatactcttctcctcccaagtctgggcagcttcatgggtacttcgcctcagccactcccctccctgccccttcccttggcctccaactctttggggctttgggggaacttgagagtacagaaaaagcaggcagggaggaggcgccagctgttgctcttcgggtaatgacttagattgtgccacgagcagcatttctagtgttgagggacagagtgcaaatgaacgcaacgaaaaaggaggaatgggtgatggagaagcctgggctggaatggaggacggtgggtggggaagtgtgttgagagagcaaacagagggcagaggacatgaatgtggatggcaatggacaacagggaaggggtggtacattctcaagtaaaaaagtagactggacacaggaatcaggaagtcccagacggaaaagagaaagagacaggagaaaacaagagggcgaattacaccaagttaccagacattcaggtctttccattgttaagtgccccatccccatggtctccctccaacccaagccagtgacacacagcatagccccacttcctcagaacaggaggcgccatctccctgcaatgctttgcagggggaaggcttgtccatcaaagaaatcccttgtctctgcccttcccccgtcccgaaccaggtgacgatcccatagcagcggtctccatacctcagtcagagcagccccactccccaggcaggcaggcaggcagggagaagactccaggaccttcccacctcttcaccccaccagcaacttcagcgatacttacttacaataactaccacgatgatggcacagatggctcccagcatgatcatcatctgaggaaacatggacaaaaaatgagcccttggatttcaggaatgaggaaaagagccacatctctagtgggaaacagaattccttccatccttgggacaatggaaaaaaccacccatcacccaggagacctgcaggcctcttagagaggccctacccttctgcttcccaggggatcataaccacagtatgtctttagcttttcagattcatcacaggacctgcattgagctcctttttgcttagttcctggtgtcttggggctttagaaggcattccaatagagatacagactctggatatttaaccaattagttcaattttcactgtgaagtgttcagctcattctcaaaagttgcagttatttaaaaatatatatttcaatctgagaaagctgatttaaaagaaaaagaaaaaagtatatatatatatatataaatgtatatatatgtatatatacatatgtgtatatatagtgtgtgtgtgtgtgtgtgtgtgtgtgtgtgtatgtatatatgcctgagccattgtgctgatgttgggtgtgtctgaggatgagacaggtgaaattttttgcaggcaactcctttggggtaaagctccttaactaaccattccaaactcctcagggtatcactttttccctgatagcggttctaaatactctagcctaccctggtggccaattctgggtaatgcaatctcaagaggaggctttccagatttcctcccaagcgttatgctggtcagagagatcctgcaccattagagggaagaaatgtagaagctgagggttttcttgccttctaccagtggaagcccaggaaaagatggaggaggggacaagaaaattcaccttgcagtttttccaccaatacttcctctttagctttgcagcactgctctcaaattgtgatgctcctgcctgcaaggcatcagctcggtcatccagctctgacagcttctggtccctctccaggaccttgtccacgttcacacgtatgatgtccaccacctgaggagggcacagaaacaaagctgctaagcttcctgccagagacagaggaaaggacaacaaccagagaatcacaagtctggccctgtgcaactctaaagggtgctttgcctctcagggcctttgactattctcctacgaaaaaaggagaaaagataagaagttcccttttgtttccaaactcctagatttggaaactttcagagaaacagctatctacctacctcctccacttgtgcctgggtttgctgtagtcgtctgttactggtcatgttaggaggagggccagggggacccccacctggggcagtcccttctgtcccttcagcaggtggctgagctggagcagacctgtggaaagacatgtgcagagtacacaaagtgaccaagacaagaaaggagctgggcgtggtagcacacacctgtagtcccagctactcaagaggctgaagtgggaggagcgcttgagcccaggagttcgaggccagcctgggcatcatagcgagaccccatctctaaaaaaacagacaaaaagaaaggactcacatgcatcctcaccccaaaccacttaaacaattatgattaggctatacaaaactagaatggattcttgctccttggcaatctgaagtagggagacaaaccatagaggcaagaagtaaaagatgaaagactctgcaacaacatttggatggggttcagggacatccaggatggcatcaagacatctcatctggggctatcctttgactcaactcaaacaagtcctctgccatgatggctacagggacatatggcctagccttgtcctaaatggcatttccccgctgatatggtttggctgtgtccccacccaaatctcaacttcaattgtatcacccagaattcccacatgttgtgggagggactcaggggaggtaactgaatcatggggcccatctttccggtgctattctggtgatagtgacgaagtctcatgagatctgatgggtttatcagtggtttctgcttttgcttcttccacattttctcttgctgctgccatgtaagaagtgcctttcacctgccgccatgattctgaggccttcccagccatgtggaactgtaagtccaattaaacctctttttcttcccagtcttgggtatgtctttatcagcagcatgaaaacagactaatacagtaaattggtaccagtagagtggggtgttgctgaaaagatacccaaaaatgtggaagcgactttggaactgggttaacagggagaggatggaacagtttggagggctcagaagaagacaggaaaatgcgggaaagtttggaacctcctagagacttgttgaatggctttgacaaaaatgctgttagtgatatgaacaataaggtccaggctgaggtggtctcagatggagatgaggaacttgttgggaactgaagcaaaggtgactcttgttatgttttggcaaaaagactggcagcattttgcccctgccctagaaatttgtggaactttgaacttgagagagataatttagggtatctggcagaagaaaagacgcagtactaaagaaaaaaaccatttttttgagaagaaattcaaggcagctgcagaaatttgcataagtagcaaggaacctagtgttagcccctaagaccatggggaaaatgtctccaggccatgtcagaagccttcacagcagcccctcccatcacaggcctggaggcccaggaggaaaaagttattttgtgggccaggcccagggtccccatgctgtgtgcagcctagggacttagtgccctgtgtcccagccgctcccactgtggctgagaggggccaatgcagggctcgggccgtggcttcagagggtggaagccccaagccttggcagcttccacatggtgttgagcctgcagatgcacagaaggcaagaactgaggttcgggaacctccgtctagacttcagaagatgtatggaaacgcctggatgtccaggcaaaagtttgctgcaagggcagggccctcatggagaacctctgctagtgtagtacagaagggacatgtggggttggagcccccacacagagtccccactggaacactgcctagtggagctatgagaaaaaggtcaccattctccagaccccagaatggtagatccactggcagcttgcaccgtgcgcctggaaaagccacagacactcaatgccagtccgtgaagggagccaggagggaggctgtacactgtaatgtctgtcagctcacccctttttatattcaagttattggttatggttattggtttatatgcccagttattggttatgcttcacacaagatgaggaaatcagggctgccataagggcagcttggaaaatcaccaaaggcaaagtctatgtaggtggagtgagtcaggactgtttgtttgctttgtttttggcagagaaaatgggggtttcacttagatagaatctggggcccaaagcaattacattagttatggaaactgttccaagagcatagacaggaagcaaaaatgctagaaattgtcctcaatgtgcatgcattatagacattctgtcccttccttttctggatttgacagtctcagatgactcccttggttacttacatcccaaagagagatcttggtttactgtactatacacacagagaatgttctctcattctgtaccactcaaagttagtgtgtggtcttcaagacaaactcctctccatgtcccaaaacatggaggctaaactcacctcctaaagaattcccagaagtataacctaagtcatgagatgttctcggccaaggaagcacccacaggcaggggggagatctctcaaatttgatggagaatagaaattacagtaagaactcctcaaacagaagcagaatctcaccaaacatacttcacaggagcagtccaagagtaaatgcaacaaaaatgaaaccacaaagtcacctaaatggaaattatttgactaattacaatagaactaatacccagaagctcattctccttgattaagtgaatttcttttagtctaaaaagatagagaataactcctcagagaggctatggtagcagattacacctgactcattccccatttgaagaatcacttttccatttccctctaaggtgcaaaggaggtaaagcaaagatagacacaaagtcatgggagccacaagactcttgtcctgccactgagctagctaagcaatctagctctcgacttaaggcagaaaattcaatgagtaggtagcagccagtgttggaagcagtccaggatggtggcaccaatgacaagattaaggtcagagacctcgtgatgccccgctagccaccacgatttttctgttgccttctgttcatcccacgtagatactatctggaagccccctccccaaaatgaaaacaactggaattctacggcttgcccaaaatgcatagaacactcatatctggttaaaaccatagaaatcaaaaagaaaaagtgaaatggctatgaagtatttgcaaggccaatttcacttactacttgttgggagttggaaacactcaacagtaaaatatctagggataattacaacccttatgtaacacaagtaaatctttcccttttttgtcacttagagaagcaacataaatacatctaggaccaggccagggtagtaatcagaaagaaaaatctgtatcagacatattgaggtcttgacagagaagtacttcgtttgtttagccgtagttttccctcaagatcatgcgaagggggtgatgttgaagactgctggagactaaactgtgtgtgttggaggaaagggggaaagctcagctctccctatttctcctccaactatttggtaagactcggtgatagaaaaacatctcctatacgaatggccttggtatgaacagccgcttgggatgacaggccactatcccactaccccttgagtctttctgagctgctcacctggtgccagagaactggcagataagtttctgcagctttgctcactgccatgaggggggctagacatcacactttgggtgaggggtaaacaaatccagagattgtagggcaacataagttaccaactggcagttgcacccatgactgtctttcctgaggcgctgagtagtgatttagccagatgacagaaatacctttcgagtcccctgcccagttgtctccatccaccacccccagcccccgccctctccgagtctccactataccaaaaccagaatgaggcgccactcagacgagaggagagggtgcaatgattgtgggacccctgcgcccctgccccgcccgtggggtgctagctgtggctggtgcgagaatggggtgctggcccccctccctgggggtggcccggtccggaggcggcgcgcggtggtagttccccgcgttgctgcagctgctgcattgcgccattttccgtcccgcagaatcgggagcttggggcgagagttgtcaaggaggtgccgagcccccacaccagagtcaactcacatttttctgacagagagagtgagggtctgttcctctccggaggctgcggcgagacacccggcgagggacgctgcggctgaagtggacggaactgccaagctccgcctcgcgccgactaccccgcggtctagctgcgctggaacttactgcagctgccgcgccggcctccgcctttattagtgctgaccacgcctcccggataacggtgacaaccccgcggcccaatccatgcccaggacggtcgcccagcgctacaggcctagcccgccccgcccctgccaattgccagtcacaactctcctctcatccgactccggaaaggagcggttgctgtgaggatccttcagtgatcaatgcgaccatagtttgcgctccagtctggcggagggacggggcggggtggagatgaggtctgtcccttcggagggcgcttcagcagtttgttaggaatttgtggtgcctcccaaccaatcgctaggcagttactgaagaccgtgcccgcccctgccccaccccgcgccgggactcgcgcattcagctggaggcggcggctccctggtgcgcgcccagccctggtgccctgctctggccctcgctccgcaccaccgccccgcctctaactaacgctctgagagggtgcaggagcctcgagacacagccacaagctcctggtgccagataccggatgcggggttccgtcccaccaaagcaagcacgaagctttcgttcattcgtttctttcaacatagccttcctaaattgaactccctcccaaacctgctccagtcgaggttaccacatcgactcagttgcccagaccagaaacgtggaaaccatcctagatttcctccccttcacctttacctctcccccagtaatctgccaaatcgagttgatttttccttcttggcattccagtgattatctcccctctgctcactattatccctttcctggactccatcagttggaaaattcaccattattttatgtcccgctaagaaaaaaggttacaaggccgggcgcagtggctcacacctgtaatcccagcactttgggaggccgagtcaggcagattacctgagatcaggagttcgagaccagcctggccaacatggcgaaacctctgtctctactaaaaatacaaaacagccaggcatggtggcgggcgcctgtaatcccagctactcgtgaggctgagataagagaatcgcttgaagccgggagccgacggttgcagtgagctgagatcacgccactgcactccagcctgggcaacagagcaagaccctgtttcaaaaaaaaaagaaaaaaggttgcaaattatctgtgacaaatgctttccttaccacttagcatttttgttttacatgtattgaaaatatgggtttatatacataccgatttctatatttcactcttgtgcatgcataaaaagggaaatagaaaacaataacatggtaactatccctaaaacttcacagagactgattgttaatgattcacttttttgactcagtcttggatgtccacgaatttccacgcaatgtagtcctctgtgcatttcataagggctttggtgatgcagcatttcctaagagtgttcctctccaggctctagagttttcttccaagcctcagacacccatttggcaagctttgatgctcatgagcaggtatgacaaatatagtttgactgctgtctgactaatagctaaagtgaaacatcccaattagaagatattgaaatgcaaaaaaacaaacaaacaagcacacacaaaaaacccaagtgcctcctaagatcaatgatacatcattctgcttccagtcttgccatcctttacatctattctctaaaaagtccaccaaagttatctatccaaatgtcacaagtcttcttaaggaaacaattgcacttggaaacataatgcattcatcatatgtgtttatcccattctcctcctgaaaccacatcaaaatggcaagttagggggaaaaatgacaatttgggaaaatttgcaaaaaattataagcccccaaagacaaaaagaatggggccgggcgtggtggctcactcccgtagtcccagctatttggggggctgaggcagaaggacagcttgagcccagatgttccggttgcagtgagccgagatcacgccactgcactcccacctgggtgacaaaatgagaccctatctccaaaagaaaagaaaaagggccaggcgcagtaactcacacctgtaatcccagcaatgtgggaggccaaggagggcggatcacttgaagccaggagttcaagaccaacctggctaacgcagcaaaatcccgtctctactaaaaatacaaaaattagctgggcatggacgcctgtagtcccagctactcgggagactgaggcaggaggatcacttgaacccgggaggcggaggctgcagtaagccgagatcttgccactgcactccaacctgggcaacagaatgagactgtctcaaaaaaaaaaaaaaagaaagaaagaaagaaaaagaaaagaaaaaaaaagaaaagaaaaaagaatgggaggaaatatttctggcagcatgaatgcctatttatccccaccaactttcccctgaaaaaaaacttaaaatcattgaatggtgactcatgcctataatcccagcattttgggaggccaaagcaggaggatcacttgagcccaggagttcaagactagcctggacaacatggtgaaatcctgtctctacaagaaatagatacaaaaaaatatagctgggtattgtggcacacacctgtagttccaactacttgggaggctgaggtgggaggattacctgagcctgaggaggtcaagaaagcagtgagccatgatcacaccattgcactccaacctgggcaacagagtgagaccctgtctcaaaaaaacggggttgagggggtggcattttttaaactttttttttttttttttgagacggagtctccctctgtcgcccacgctggagtgcagtggcgcaatctcggttcactgcaagccccacctcctgggttcacgccattctcctgcctcagcctcctgagtagctgggactacaggcacccgccaccacgcccggctaattttttgtatttttagtagagacagggtttcacagtgttagccaggatggtctcgatctcctgacctcatgatccacccgcctcggcttcccaaagtgctgggattacaggcgtgagccaccgcgcccggccttaaactttttattttaaagtaattatagattcatataaggtggccaaaaaaaaaaatacaatacagggaggttcccctaaacccctttacccagttcccccaacagtaacatcttgtataaatacagtttaaaattattaaaatattaaaaccaggaaattaacattagcaaaatccagagtttattcaaatttcaccgattttccaaactggcatgtaccaccaaacacttctttttgtgttcgtgtgtgtttgagtggttttatgcaattgtatcatgtgtagatttgtgtaaccacaaccacagttaggatacagcattttcacattactgcaaggctcccatgtgctacccctttatattccaacccaccgccatccctaaaccttagcaacactaatttgttctccatctctgtaactttatttcaagagccttatgtaaatgtaatcatgcttttttctacatcacgtaacctttcaagattggcttttttcattcatccaagttattgtgtgtatcattactttttcaaccatccaagttattgtgtgtatcattagttttcaccactgattaatattccgtggtacatttaaccatttacctgctgaaggacatttggagtgatttcagcactgggctattacaaataaagttgctgtgaactttcatacaggttttgtgtgaacataaattctcatttctctgggataaatgcctgagtgcaatgcttgggcagtaaggtaattgcatctctagttttataagaaactgcctttgcctgtgttgcccaggctggtcttaaactcctgagctcaagcaattctcccacttcagcttcccaagtagctaggactataggcatcatgcccagctgtatttttcttattttaaccattctaatatgtgttcagtgctatcattgtggttttaattcttatttcactgatggctaatgatatcaaatatcttttaaagtgtttgccttgtatatattatcctatttgatgaaatgttggttcatgtcttttggccattttctttttttttttattgatcattcttgggtgtttctcgcagaggggaatttggcagggtcataggacaatagtggagggaaggtcagcagataaacaagtgaacaaaggtctctggttttcctaggcagaggaccctgcggccttccgcagtgtttgtgtccctgggtacttgagattaggaagtggtgatgactcttaaggagcatgctgccttcaagcatctgtttaacaaagcacatcttgcaccgcccttaatccatttaaccctgagtggacacagcacatgccgcagagagcacagggctgggggcaaggtcacagctcaacagcatcccaaggcagaagaacccctcccagtacagaacaaaatgaagtctcccaagtctacttctttctacacagacacagcaacaatctgatttctctatcttttccccacctttcccccttttctattccacaaaaccgccatcgtcataatggcccgttctcaatgagttgttgggtacacctcccagacggggtggtggccgggtagaggggctcctcacttcccagaaggggtggccgggcagaggcgacccccacctccctcccggacggggcggctggccgggcgggggctgaccccccacctccctcccggacggggtggctgccaggcagagacgctcctcacctcctagacggggtcacggccgggcagaggcgctccccacatctcagacgatgggcggccgggcagagacgctcctcacttcctagacgggatggcggccgggaagaggtgctcctcacttcccagactgggcagccgggcagaggggctcctcacatcccagatgatgggcggccaggcggagacgctcctcacttctcagacagggtggctgccgggcggaggggctcctcacttctcagatggggcagctgccgggcggaggggctcctcacttctcagacggggcagccaggcagagacgctcctcacctcctagacggggtcatggccaggcagaggcgctccccaaatctcagacgatgggcggccgggcagagacgctcctcacttcctagacgggatggcggccgggaagaggtgctcctcacttcccagactgggcagccgggcagaggggctcctcacatcccagacgatgggcggccaggcggagacgctcctcacttcccagacggggtggcggctgggcagaggctgcaatctcggcactttgggaggccaaggcaggcggctgggaggtggaggttgtagctagccgagatcatgccactgcactccagcctgggcaacattgagcactgagtgaacgagacttggtctgcaatcccggcacctcgcgaggccttctgagtagctggtactacgggcgcctgccaccatgcctggctaatttttgtatttttagtagagacggggtttcaccatattggccaggctgatctcgaactcctgacctcagatgatctgccagcctcagcctcccaaagtgcgggattacaggagcgagtcttgtatttcttttaaaatcaatctcacacacacccttttttctccctctccctcacatatcctgttttctctttttagacatcggactattaattagacattggactatttggcttaattttctaattatctttcttatttcctgtctccatctctgctggttcttgttcttggtgccttgttccttatttgtttggaatttttgaccacaatttatttttcttggaactgtatctgtggaaattccccgaggcctagattaaagatgagttcatccagaaaggatctgcattgcttctgctgggttcttggtggtactgtcaatccaaaaccactttaaattcttgccattttctttttaggatcaacaaagagttcaggcagaaacaccacagcctgtggttatacattctctgcaaatacttaaaagaaaaaaataaaagaactccagcaggcacctgggttccagacaaacaacattccacggagtgctctggggcagtttgggttctagtatattcgtaattcattcttagatgaggatatagtcctttggggttctgactttatggtaaggactttctattagatttccaaccttgggtaagccctgggctttatttcgtgtgccacagtggtagcctgtgaggctgctacgctcatattaaactttatagcaaataccctcagagcaaaatagtctttgggactcagcaacttccctggttactggctttcacttagtttttcgtgtttaaatagtctttactctcaggccaactcataaatagattttatctatagaagaataaagaagaataaaataggaggaataactatctcatgcttactactatatagttgcagtaatcaagacagtgtggtattggtgggaggacagacacatagatcgatggcaccgatgagagaatgcagaaatagacccctacaaatatgcgcatctgatttttttttttttttttttgagacagagtcttgctctgtcgccaggctggagtgcagtcatgcaatctcggctcactgcaacctctgcctcccaggttcaagcgattctcctgcctcagccgaccaagtagctgggactacaggcgtgcgccaccacgcccagctaattttttgtatttttagtagagacgggttttcaccatgttggccaggatagtctggatctcttgacctcgtgattcgactgcctcggcctcccaaagtgctgggattacaggcgtgaaccaccatgcctggccttctgtattttttaagattcctatctggagagcccccagctctgcggcggcttcacccgcgagtcccaaggcaagcgagcggctgggtcgcccccaccggccccatggcagcccccggggccccagctgagtacggctacatccggaccatcttgggccagcagatcctgggacaactggacagctccagcctggcgctgccctctgaggccaagctgaagctggctgggagcagcggccgcggcagccagtcaagagcctgcggatccaggagcaggtgcagcagatcctcgcccggaagggccgcagctccgtgggcaacggaaatcttcaccgaaccagcagtgttcctgagtatgtctacaacctacacttggttgaaaatgattttgttggaggccgttcccctgttcctaaaacctattacatgctaaaggctggcacaactgccacttatgaaggtcgctggggaagaggaacagcacagtacagctcccagaagtccgtggaagaaaggtatttgaggcatcctctgaggagactggagatttctcctgacagcagcccggagagggctcactacacgcacagcgattaccagtacagccagagaagccaggctgggcacaccctgcaccaccaagaaagcaggcgggccgccttcctggtgccaccgagatatgatcgttctgagatcgcgggggtccgccgtactggcaccacaagcaggcagcaccactttgacaccacaggcagtaccagcgtggctctgttagtgacaccgtttttgacagcatccctgccaacccggccctgctcacgtaccccaggccagggaccagccgcagcatgggcaacctcttggagaaagagaactacctgagggcagggctcaccgtcggccaggtcaggccgctggtgcccctgcggcccctcactcagaacagggcttccaggtcctcctggcaccggagctccttccacagcacccgcacaccgaggaaagctgggcccagtgttgccgtggattccagcgggaggagagcgcacttgaccgtcggccaggcagcggcagggggaagtgggaatcttctcacccagagaagcactgactcccagctggggaatgcagacatggagatgactctggagcgagcagggagtatgctcgatgcagaccagatgccgccgtccaggatttctgccgcagccactttcatacagcacgagtgcttccagaaatctgaagctgggaagagggttaaccagttttgtggcatccccaagcttctgcagctcctaaaagttcagaatgaagatgttcagcgagctgtgtggggggccttgagaaacttactatttgaagacaatgacaacaaattggaggtggctgaactaaatggggtaactcggctgctccaggtgctgaagcaaaccagagtcttggagactaaaaaacaactaacaggtttgctgtggaatttgtcatctaatgacaaactcaagaatctcatgataacagaagcattgcttatgctgaccgagaatataatcatctccttttctggatggcctgaaggagactacccaaaagcgaatggtttgctcgattttgacacagtctacaacccactggatgtctaagaaacatgagtgctgctggccctggtaggagaaaagcaatgagaagatgtgaccgactcattgactcactggtccattatgtcagaggaaccattgcggattaccagccagatgacaaggccacggagaattgtgtgcacattcttcataacctctcctaccagctggaggtagagctcccagagaaatattcccagaatatctatattcaaaacccaaatgtccagactaacaacaaaagtattggatgttttggcagtcgaagcaggaaactaaaagagcaatactaggacatgccgatgccagaggaaaagagcaaccccaagggcgtggagtggctgtgacactccattgtgataaggatgtatctgtccttgatcgccaagagtgtcccaaactacacacaggaagcctccttaggcgctctccagaacctcacagccggaagtggaccaatgccgacatcagtggctcagacagtcgtccagaaggaaaatggcctgcagcacacccgaaagatggtgcatgtcagtgacccaagtgtgaaaaagccagccaacttgctgctgaggaatctgtcccagaatctttctctgcagaataaaattgccaaagaaactctccccagtttggtctccatcattcctgatacagtcccgagtactgaccttctcattgaaactacagcctctgcctgttacatgttgaacaacgtaatccaaaacagttaccagaatgcacagcgccttctgaataccgggggcatccagaaaattatgaccatcagtgcaggcgatgcctatgcctccaacaaagcaagtaaagctgcttccatcctcctgtattctctgtaggcacacacggaactccatcatgcctacaagaaggctcagtttaagaagacagattttgtcaacagctggactgtcaaagcctaccactcccttaaagactgaggaaaatgacgaagtattctcagctgcaaaaaaatcccacaggaaaacacctatttttctactacccagcccaagaaacctcaaaagcatgcctcgtttctatcattttctatttccatggtcccccgaatccagaaaacaagtataacataatcttatgagtcttccagaagacttttgcaagcttgccaccagtagatactggtcacaggctctacaaatagtggtctttgttattagggcttatggtgcatggcctcctggaaccaaaatgtgaattcatgtggaatggactttgatccaataaataaggaaagaagttgttgcattactgggattttaaaagcttgatttacatttatattccttttctagttcccatgttttgtcactcatgtgcacattgcttcaccattgggccatgagtatattgttctgtagtgttgaaacagaatggaaatgacaagaaatatctgcagttatccaggagaaagtataatggcaaaattatttgtttctttgtttactttgtgctcgtttttatctccttaggtttttttcctctgatttttaaataaacttaagaaatttagattacagagtatgcatgactgtaagaaaaagaaattgagaggaagtgatcatagcaaattaaagaaacctttttctcccaaaacttaaagtaaaataaataaaaataaaaataaatcttttccccagagaaaggcaactgtgattataaagtttaaccttcccccaaacactgaatgaatgagatttttgctccggaaatactttacctataacaacaccattaaatccaaatctcttctaaacaatggcattccgtgtaatgcctttcctggactttttttttttttttttttttagacggagctcaggctggagtgcagtggtgcaatcttggctcactgcaacctccgcctccctggttcaagtgattctcctgcctcagcctcctgagtagctgggattacaggcgtgcaccaccacgcctggctaatttttttgtatttttagtagagacagggtttcaccatgttggtcaggctggtcttgaactcctgacctcatgatccgcccggctcagcctcccaaagtgctgggattataggtgtgagccaccgcaccgggccttctgtattttttaggccactgccctggactagtggaagaatggactctagtctttatctgcaagaggaactaaggccttctatcagactgcccggccagcctggggcactgaaaatacagctcattttaatgagttacattatcaaccagctttgcccagcatttaagaaatatcacagggccactaaatctcatatgatcttcttcaagccattattttaattcaagaaaactctagagaaaaaagtgaagaagtcatgttgaagaagatataagaatgtgtcaagaccatacagaaatgatatgagaaatactggtgttttaaaaggtgacatcatccagtgaaatgaatctatattaaatgttattttaactgcattatgattaaaaccattcatatagagttagtcttcacaactactattctgttatattttgttttttttttttttaaatctgacaacgtttgtcataagtaagataaggaaaaaaactcttcaactccttttggccagaaaagtgtaatagaaaataaatgttgaatatgtacttaagtctttattatatttgaaacttaaattttttttcagttttaaaagctgaatgaagatagcttaggtaactaacctagttcaaaatgaaatttagataccaatttttaaaatactggagagaatttatatgtctttttccagagttctgataataagcatttggagtgcattcattcctccagataataaatgtatgttcaagaactttttgtgttttttaagacattaatagagtcttcaataatattaaatacaaaaggagacaaaaaaaaaagattcctatctggactgggcacggtggctcacgcttgtaatcccagcactttggaagtccgaggtgggcagatcacgaggtcaggagttggagaccagcctgaccaacatggtgaaaccctgtctctactaaaatacaaaaaattaatcgggcgtggtggcacgcacctgtagtcccagctactcgggaggctgaggcaggggaatcacttgaacctgggaggcggaggttgcagtgagcctagatcatgtcattgcactccagcctgggggacagagtgagactccgtctaaaaaaaaaaaaaattcctgtctgttttagtcaatgacaatcaaattatctgtaaataatcacagtttgatctcttcgctttcattcctcatatctattttttttaaatagcattgagtatttccatactaaattaaattgcagcagtgatagaggccatcgtaggacaggcccagtggctcacaccggtaatctcagcaactcaggaagctgaggcaaggagaatcatttgaacctaggagttagagaacagactggaaaacctagcaagaccctgtttctacaaaaaataaattagctgggcatggtagtttgtactcatagtcccagctacttgggaggctgagacaggaggattgcttgagcctagaaatttgaggctgcagtgagctgtgatggtaccactgcattccagcctgagtgacagagcaagaccccatttcttaagacaagcaaaaaaaccccaaaactgaagtactactaacatatgcaacaacatggataaaccttgaaaacattatgctaaatgaaagaagccagtcacaaaagactggaatattgttccatctatatgaaatgtccaaatagacaaattcagagatgcatgcctgtaatcccaacactgtgagaggcagaggtgggcggatcacttgaggtcaggagttcgagaccagcctggccaacatggcaaaacccagtctctactaaaaatacaaaaattaactgggcatggtggctcgtgcctgtaatactagctacttgggaggctgaggcaggaggcaggagaattgcttgaacccaggagacagaagttgcagtgagccaagattgcacctttgcattctagctgggcgacggagtgagactcagtctcaaaaaaaaaaaaaaaaaaaaaagaaagagaaaggaaatagattagttggccggacacattggctcatggctgtaatcccagcactttgggaggccaagacagtcagatcacttgaggtcaggagttcaagaccagcctggtcaacatggcgaaaccctgtccctactaaaaatacaaaaattagctggacatggtggtgtgtgcctgtaatctcagttactcaggaggctgaggcaggagaatcacttgaaccttgggggtagaagttgcagtgggcaacaaagcaagatttcatctcaacaaagaagaaaaaaaaaagtacctggggatgggataagtggttgaaaagggggaatgacttgtaaggggtttcttttggggtaaggaaaatgttctggaagtggagggcgggggcaggtttggtaagatattggtcaaagggcctgggctgggcacggtggctcacatctataatcccagcactttaggaggctgaggcgggctgatcacgaggtcaggagatctagaccatcatggctaacatggtgaaagcccgtctctactaaaaatacaaaaaattagccaggcgtggtggcacacgcctgtagttccagctgctcaggagactgaggcaggagaatcacttaaacccgggaagcagaggttgcagtgagctaagatcgcaccactgcactccagcctgggtgacagattgagactctgtctcaaaaaaaaaaagacattggtccaaggatacaaagttttggttagacttgggaataagttcaagtgtctattgtacaacacagtgactatagctaataacaatgtattgtatacttgaaaattgctgagtagattttaagtgttcttatcagaaaaaatgaaaagtatgtgaggtaatgaattctttaattagtttattttagtcattctacaatgtatacatattttaaaacatcatgtataccatcaatatatgtaatttttatttaaaaatttaagaataaataactttttaaattttttgacattaggtagtggtgatggttgcacgacctcatgaatatactaaaaaccatttgattgtatactaaatgagtgaattgtatggcatgtttatcatttcttaatttttaaaagtggagtgggaaacttgaagatttgtttctaaattacctttactttgtattaaatcaaatcaaaatgaagagaaagttatgtgacaaaaacagcaatcctcttcttcaccccagcctaccctctagactagcttcccagaatcagagactttcacttcttttagctatttttatttatttgtttgtttgtttgtagagatgggggtcgtgctgactaggctgatttcaaactcctgggctcaagtgatcctctcttctcagcctcccaaagtgctgggattataggcatgagccaccttgctaggcctagctgtttttttctggtacttatcatcataatatgaaataatattatgatttatcagtgtggtggtttttgtttttttgtttttttgtttttttttttacacagagtctcactctgtcactcaagcttgagtgctgtggtgcaatcatagctcacaacagcctcaacctccctggtctcaggtgatcctcccacttcagcctctctcttttctttctcttttttttttttttgagacagagtctggctctgttgcccaggctggagtgcagtggtgcaatcttggctcactgcaacctccgcctccctggttcaagcaattctcctgcctcagcctcccaagtagctgggactacaggcacccaccaccacgcctggctaatttttttgtatttttagtagagacgaggtttcaccgtgttggccaggctggtctcaaactcctgacctcatgatctgcccacctcggcctcccaaagtgctgggattacaggtgtgagccaccgcgcccagccacacttcagcctctcgagtagctgggactagaggcgcatcccaccacactagactaattttgtattttttgtagagccagtgtttcgccatattgcccaggctggtctcaaactcctgggctcaagtgatcctcccgcctcagtctcccaaagtactagcattacaggcgtgagccaccgtgcccaaccagtttatcagatttatttatttatttatttatttatttatttatttatttttgagatggagtcttgctctattgcctaggctggagtacggtggcatgatctcagctcactataacctccgcctcctgggttcaagcaattctcctgcctcaccctcccaagtagctgggattacacacatgcaccaccatgcccagctaatttttgtattttttagtagagatgggattttgccatgttggccaggctggtcttgaactcctgaccttgggtgatccacccgcctcagcctcccaaagtgctgggattacaggcttgagccactgtacccagccactttatcagttttgtagaaatcaattagattcctgttataaaagatgaggttttagttctttttgattatctcatttgatattgtaaaaggaattttaaaaaatgcaaatctataattaaaacgaatgttaaacttggaacagaaggaaatatcttaacttggtaaaagttatatactagagattcataacaaatatttaatagacatgtattccatttaagatttagaacaagaagaggatgccttttttttttctttcttttcttttcttttctttttttttttttttttttgagacagtctcactctgttgcccaggctggagtgcagtggcgcgatctcagctcactgcaacctctgcctcccggcttcaagcgattctcctgcctcagcctcctgagtagctgggattacaggcgcctgccaccacgcccggctaatttttgggtttgttgttgttgttgttttgttgtttttgagatggagtctcactcttgtcacccaggctggagtgcaatggcgcaatctcggctcactgcaacctccgcttcctgggttcaagcgattctcctgcctcagcctcccaagtaactggggattacaggtgcccgccaccatgcccagctaatttttgtatttttaggagagatgggctttcaccatgttggccaggctgatctcgatctcctgacctcaagtgatccgctcacctctgcctcccaaagtgctgtgattacaggtgtgagccaccacccgttgttttttttttttttttttgagacagagttttgttcttgttgctggcagggattacatgcgtgagccaccgtggctggccctattttttttttttttttttttagagagagagataggctcttgctctgtttcccaggctggagtgcactgatgtgatcatagttcactgcagccttgaactcctgggcccaagccatcctcccacctcagcctctcaagtagctaagacgacaggcactcaccagaactacaggtactcaccaacctacccagctatttttttctttttattttttagaggcagggtctcactatgttgcccaggctggtctcaaactcctggcctcaagtgatcctcccctcccgcttggcctccaaaagtgttgggattacaggtgtgagccactacgctggccagtacctcattttacagcttaataatattccattgtcagtgtgcaggaaggagtgttaaaaagaaagttaaaaaaataatattccatattctggttgggtgtggtggttcacgcctgtaatcccagcactttgggagggcaaggtaggtggatcacgaggtcaggagatcgagaccaccctggctaacacggtgaaaccccgtctgtaccaaaaatgcaaaaaattagccgggcgtggtggcaggtgcctgtagtcccagctattcaggaggctaaggcaggagaatggtgtgaacctgggaggcggagctcgcagtgagccgagatcgggccactgcactccagcctgggcgacagagcgagactctgtctcaaataataataataataatattccatattctattgtatggatagaccacattttgtgtatccattcaccagctgacggatatttggattgtttcttctttttagctattatgaataatgttgctaaggagatttatgtacaagtgtttgtgtggacatatgttttcagttttcttgggtataaacctaggagtggaattactgggtcatgcagtaactctacacttaactttttgtggaactgccacttttccaaagtggctgcaccattttactaaaggctaaatttttttttttgagatggagtctcactctgtcgcccaggctggagtgcggtggtgcgatctcagctcactgcaaactccgcctcctgggttcacgccattctcgcgcctcagcctcccaagtagctgggactacaggtgcccgccaccatgccaggctaattttttgtatttttagtacagatggggtttcaccgtgttagccaggatggtctcgatctcctgacctcgtgatctgcctgtctcagcctcccaaagtgctgggattacaggcgtgagccaccgcgcccggccccctaaaggctaaattttaataatcattacaatcttcaggatctgactcttgcttcccatctctttccctgtcttttaccacaagcagtagctccaccagtaaataccactcatagctttctcatgcacaccatgctgtttcttgactctaggcctttatttctgcttcaactgcctggaaaaactgctagcctccactcccttaagacaactcagtggtcacctcttctctaaagcccttctcgtccccattcctgcttcctcaggaaaagataggtgtctcttcctctccacacctatacacatagctattaacaaactttaaatgtcatgacatactggatttcataactatgcttcttcatctgcctcttgcactgggtggaattcttttttccttttttttttttttaaaggcaggatcttgctatgttgcccaggctagaatgtagtggcctgatctcagctcactgccacctccacctgctgggctcaagccatcctcccccctcagcctcctgagtagctggaattacaggcatgtgccatcatgcccagctaatttgttttttgtatttttttagtagagatggggtttcaccactttggccaagctggtcttgaactcctgacctcaagtgatctgctcacctcggcctcccaaagtgctgggattacaagcatgagccactgctcctggcctcaagagctcattctaatgccatcttttcaacaaataccttttctgatcatccccctcagcaaaaaaaaaaaagaaaaaaaaaacctgtcatgggactcgctttcattatcatatttaaatttacattttgtttacatacacatctcttctttttttcttttttccagtcttacccctgtataaactggatgaagctgctgccaatttaaccaagtgggaatcccagtgctaattgtctgctggatgggatatctttattggagcagattaacatagcctcacatttgtggtttgtgaccactgatttagcaaatacattgtttttcttttttctttttctttttcttttgagacagggtcttgctttgttgcctaggctgaagtgcagtgtcacaagctcagctcactgcagcctcgacccccaaggctcaagcaatccttccacccagcctccacagcagctgggactacaggcacatgccaccaacgcctggctaattttttttttttttttttgtggagacagcatttcaccatgttgcccaggctgatctcgaattcctgggctcagctgatcctctcgcctcaacctcccaaagtgttgggattacaggtgtgagccactgcacctggcgaacatccttttcttttttgtttttttcctttgagacagagtttcgctcttggtgcccaggctggagtacaatggcacgatcttggctcactgcaacctccacctcccgagttcaagcgattctcctgcctcagcctcctgagtaggtgggattacaggcatgtgccaccaggcccagctaattttgtatttttagtagtcagggtttctccatgttggtcaggctggtctcgaactcctgacctcaggtgatccgcccaccttggccccccaaagtgctgggattacaggcctgagccagcatgcccaaccaacattcttttctaaagcatgttggtcagaagcagtccaccacggaggggatgaacaacagtatacagtcatggtctttcatcagggctatgttaattctgttctctgtcatgatgtaatctaaaaaatgtggaccatttgcacattctgcagagtatcacattggtccaccatcttgtaactttacatccttcagacgtctttttttttttttttttctttttttaaagacagagtctccctctgttgcccaggctgaagtgcatggtgcaatctcagctcactgcaacctctctgtctcccggattcaagcgattctcctgcctcagcctcccgagtagctgggattacaggcacacaccactatacctggctaatttttttgtatttttagtacagacgaggtttcaccatgttggccaggatggtcttgatctcctgacctcgtgatccgcccacctaggccttccaaagtgctgggattacaggtgtgagccaccggacatcttttaagtagaatgaagactacttagaggtaggaaccaaccctaccttggtgatttttgttcctccaaatatctttgcacataataattcaatatttattcaaagaaaacgttatatactgtttcataccacaaacaagattgttctgtccttgaaaacaaaaccttttgtatctttgaatcaggaaatattctataaatgcctattgacctattaatttcctcttccctaacaatcagatactctaccaggatatgtagatatcttcttcagggcaccttgcacttagcagagtcccaaatattttattttctccactctagcaccaccaaatcatgtaaagtatacagccactcacatttcacatcaacttctccattcttatgcatagctccttccagccacccctctgaaaactgactctcctaaacatttccgtaagacccaggatcatgttttcatatatacccatcaatccatttatccaaaacccacttgtaatttaacaagtgctttttatttttattgaagatggggtcttgctatgttcctaaggctggcctccaactcctggtttcaaaggatcctcccacctcagcctgcagagtagctgggattataagtgtgctccaaccaccatgccccgcaacaagtatttattaatctaacttcacttttatggagtttttgttttttaaaatatagagatggggtcttgctatgttgcccaggctggtcttgaactcctggcttcaagcaatcctcatgccttggcctcccaaagtgttgggcttacaggtgtgagccactgcacccagccctaacttcactttttttttttttttttttttgagacagtctcaccccagttgctcaggctggaatgcagtggcatgatctcagctcactgcagcctcaaactcctgggctcaggtgatcttcccacctcagcctcttgtgtagctgggactgcaggcacgcagaaccatgagtagctggaactacaggcatgcagaaccatgcccagctaagttgttttttttttttttttgagacagagtcttgctctgttgctcaggctggagtgcagtggcacgatctcggctcactgcaagctccacctcccaggttcaagtgattctcctgcctcagacacctgagtagctgggactacaggtgtccgccaccactcctggctaatttttttgtttgtttgtttttgtattttcagtagagacagggctgtgttagccaggatagtctcgatctcctgagctcgtggtccgcccccctccgcctcccaaggtgctgggattacaggcaggagccaccgcacccagccactttatttttagtagagacggagtttcaccatgtcgcccagaccagtctcaaattcctgtctccaagcaatcctcccacctcagcctcccaaaatgctgggattacatgtgggcaccattctgcccagctgtaattcttaaaaattattattaaaaaagaacaaaacacatagatgccctagactcaactcagctctactgatcaatctttaggggttaggactaggcttttgaaatgttaaaacacccagaaaactgatgaccagtcaggcttagtatccgccatctctaccattcatatggtacttaatgtttcatatttaaatggaaaggacacctcacacttttttgtttttcctatagttcctactcagagaatatgcctaataaatattttatgagagtagtacagaagtatgactccatttttctcttatatttcatttcagtgtggaaggctctttagaaacactattaacataacagcattatgtcaaaaagcgccaataacattctcaccaacttttctttttaaaggaattaggtatagctagactgtaaaaggcaagtggtgtgaagcccaaacctaagatcctaagatctaggatgagtcaagacttcatagtctacatgagtagaggcagcatctagaggaaaacaaaagtatgtggctatcaaattccaaagaagccccattttattacagagaaaatacaaagccgtttcctcacagggaaaagtacagtttcccttctccagggtgacagatgagccttttccgaagttctcagctttctcttctatcgaaacttcccatgtcggttaaagtgtttgtagagatagcggatgcgtttattaaggttgtgcaggtcatcagcgaacattctacttccaaccattttcctctttcggatacaacgttgcaattcattccctttccaacctcgaagccatatgggccccctgatcagttctttggggtgcttttcaaagtttcctgtgtaatgtgagagaacacattagatccaagacaagagaactcatcctacaccagctaagctttcaacccacggttgcatcttgctgagcagcacctatagacaaggaacattacagtacagaacaatagcacagactctggagccagactgcttggggttaaaattctgatgctgccatttattaactttggaaaaactgtttatttttacttatgaagtaaaaattatacgaggggactcagaacagtgccaaacacaatgtaaacagctacataagtgtttgctcttactattgagcacagtaccactctctacacaggaggaaaagatagtcgttacagcctaattgccattctgaaattgtgtaccacgtcgaaggtcaagtcttacccaggatcccgatgttgtcatacactccgaacatggcccttttctcgttccaacgatcaaccactttggggggcgggagagtgagccttataccgatcaatctaggcacacctggggatggggaagggagggaattaatctgagccgcctattatactacgaagcagttatcggggtgcctacatcagccacttaccaagagagaagcttctgcacgccagaggcacccagtcccacaggcgcctacctgccccggataagaggttccctgccatttctctagtctccccccttcaacagcacaccaaataagcccaagaagatgacaggaaccgtccccgccaacttcacacgagtactaaggcgaagacagccatcttgggccttacccaggcagctgtgggcgcaccgcccacctacgccccatccgcaacagccacgagccccgccccccgggttccggcaggaggggcctctaccacccttcccgcctcagtgcttccggtccgcctgccggaagttttggagcgccggacaagctgaggtccgcgactcgtcgctaagattccccaaaactgagatttcaagaaaattcaccctttccgctttctttggcgtccttcaaccgtgaaggaaatgaaggttgagaacctggaacccgcttccaatgaccaagccctttctctgtgcctcacaacagtcttccgctgtagctgtttttattacccctattttactactggggaggagatttgaggtcctgaaagtgaagtgacttgctggacgtcacttagcagaggagatggcgaaacctggattagaggcgatgccttctaactcccagcgtggacttgcctcctttcctgggggtgactgaatgcccagccagggacgcgacgtctctggccagcagaaatacggcctcctccccgccgactgggcaaagggggaccttgcggccaaggagggattcgcaggcgggccgggggtgggagcgggggccggagccggagccttggcccgcccccgggcggcgctgtgattggccggccgctccggcgggcgtcgcgattggccgtcctgcagccgttgagatttgaactcggtatttgtggctttgcccgcgcgttgccagactcagaggcggccctttgcctctgcctgccggggattggccggattctccgccgacttgaaaactgccttgctaattggtgcgtgttgtgcacgcgtgttttttccttttcatttcagcctgactgccggaatcagagccgcgggtgagatccccaggtaagatgtggtgttgcaggtcgtaaaagagtaggaaagtcgagtacatggcagtgtgacccagtcttgggcaaaatacaataggcctagtaagtatatccctggggcgcgatgtgtgagaaactgtaagtctgacagatccgcaacggaagttgttaagcaaatcgcttaacagatccgcaacggaagatgttaagcaaatcgcttaacagatccgcaacggaagatgttaagcaaatcgcttaactttcttacttcaatttccgctctgtaaactcatttgtattattatgcacctcatgggattgaggttaggatacttagatcagatatgatacatgcaaacagcctaacagacttggcacaggataaataaatcatcattgttaatgctcttaccattctggtgcaggaagcccactagcccatgctggggcactgttttggcctcagacgagatcagaccattctctctatacttaaggagctttgcacataaaaatggaaataatagtactttgcacattaatatgccactttatagttctttaaacaccttcgtactgcttgatttgtttgatcatcagagcaactttgtgaagtaatcagagtttagtaaccctgtttttacagataaagcccagaggtttaagtgtcaagaccaagtgccaaagtcactactagaattagtttctagtccagggtcaatctcagatcccgtaagataatgttactagcttgctataaaactaaaaaccattatatatgttgggggtggggaactaacaaaaccagatgatgttactagcttgctataaaactaaaagccattatatatgttggggatgggaaagtaatagaaccagatacgaagacaggtcttgaatatagaccctgactttttcactgtttggtttctagccctgtgagcctgtaggagtagaatggctccccaaatgtatgagttccatctgccattatccccagaggagttgttgaaaagtggaggggtgaatcagtatgttgtgcaagaggtactgtccatcaaacatcttccaccacagcttagaggtaagagtccatagctgtcactgtacctagctctttcaaaggaccatctcacatggaattgctacattgtcatttctgttccactacaccaggaagcatcataagagcaagaaacatgtttttcctattttgctgttttatcctaaaattgcatgggatgcatgacccaaagagtacattcattaacttccttttctggattagtcaaaaacagtcttggtgtatgtgattactctttggggaaaagttattttccatctttaccccttactgtgtgtcaaaattaagtcctggtggatttaagagttataggagtggatcgctttttcagaatgtctcggacttaactcgacctgtttttggtaatacctttttggagtctttttggatgtgcaattatggggacaaaaacccataatatatatgtaccactgcaacactgagcaatatatgtacagtgcagtcacctactgaaacctgtaaatgatcaaaagcaccttttgcattaccagaaagacttcataatgtccttgtacttgttgggagcggtcttgtagcagttagcttgctttggagaggtatagagattaaagactggagccaggctgcctggatttgaatcctggttctaccactctgaccttagacaagttacttaattgtctcagtgccttggtttcgtcatctgtaaatatagagataataaccaattcctttgttatcacctacaagaagaagggttggttaatgcagcagctcgacaatatggtcctagcttgtctcctcttggcttttctttcatggttgctagattgcaacttctttttgtttttcttttttttttttttttgagacagggtctcactctgttgcccagactggagtgcagtgatgcgatatcggctcaccacaacctctgcctccccaggctcaagcgattctcctgcttcagcctcccaagtagctaggattacaggtgcacgccactaccacctggctaatttttgtatttttagtagagacgggatttcaccatgttggccaggctggtcttgaactcctgacctcacatgatccacccaccttggcctcccaaagtgttaggattataggcgtgagccactgcaccagtctagatggcagcttcttcctctaatgtccagaagtggaaaaaggaattttctttttgtactttttattctttattttattttgaaagacaaggtaaagactctcttgcccaggctggagtccagtggcatgatcacggctcactgcagcctcaacttcccagactcaagcaatcctctcacctcagcctcccaagcagctgggatcacagacatgcaccaccatacctggctaatttttaaattttctgtagaaacagtgtctccctatgttgcccaggctggtctcgaacttctgggctcaagcagtcttcccgcctcagcctcccaaagtgctgggattgcaggctggaatgcagtggcctgatcacagctcactgcagcctcaatctaccaggctcaagcagtcctcccacctcagcctcccaagtagctgggaccacagacatgtaccaaagtgctgggattgtaggcatgaggcaccatgctcggccagacttttttgttaaaaactaaaacacctacacacattagcctaggcctacacagggtcaaggtcaccaagaagtcactagacgatgggaatttttcagctgtattatatttttatgacaccactgtcgcatatgtggtctattgtttaccaaaatgttacagggcacaggactgtacaggtaagagaaatagaattacccagactggtttaactgatcaagcttattacctaggagcctccctaaacttgagcatatcaaccatttggtaagcaaggaagaaggcagagtgtggaggttgcctaatggatggcaaaccaacagtgtccacaggtatactattctgtccatatcatgtggatatatgtgtcaccaattgaacatgctgcatactatgacaaactactcttcacttattataatgatgcatcatttttttaaatggtcacctttttttttttaagttctggagtacacgtacaggatgtgcaagtttgttacataggtaaacgtgctgtgttggtttgctgcacctatcaacccatcacctgggtattaagcccagcatgtattagctatttttttcttatgctccccctccccccattccaccctctaacaggctccattgtgttgttcccctccctgtgtccatgtgatctcattgttcagctcccacttgtaagtaagaacatgcagtgtttggttttctgttcttgcattagtttgctgagtccctgcaaaggacatgatcttgttcctgtcacttttttgttgttgttgttgttgagactgagtctccttctgtcacccaggctggagtgcagtggcgcaatctcagctcactgcagcctccgcctcccgagttcaagtgattctcctacctcagcctcctaagtagctgggattacaggcaatgccaccacgcccggctaatttttgtatttttagttgagacagggtttcaccatgttggtcaggctggtctccaactcctgacctgatgatccacccgcctcgacctcccaaagtgctgggattacaggcgtgagccaccgcgcccagccactttttttttttttaaagagtcttttgttttttggagacaaggtctcattttgttgcccaggctggagtgcagtggctccatccgagctcactgcaacctctcgggctcagccgcccgagtagctgggactacaggcatgtgccaacatgcactgctaattttgtgttatttgtagcaacgaggttttgccatgttgcccaggctggtctcaaactcccgagctcaagcgatctgcccacctcagcctcccaaagtgctgagattacaggtgtgagccactgcacccagccaagagtcctttttaaaacaattgcattgctttgatgattttggtgtttagaatcctgaatacaacttctcctataaataagatcaaatcatttaattcatttaacaagtatttactgatcatgtgctgtgtgccagacattgttctaagcattgataatacaacagtaaacaaaacagacaaaatgacaaagttcttcctttcaaggttcttaacaagtaataaacaagtaaatatgtagtacagtaggacccttatcccaggagatatattccaagacccttattagatgcctgaaactggaatagtaccaacccctgtatatactatggttttttccctctacctgcctacctatggtaatgtttaatttacaaattagatacagtaagagattaacaacaattctttttttttttgagacggagtcttgctctgtcaccgggctggagtgcagtgctgtgatctcagctcactgcaacctccgcctcccaggttcaagagattcccctgcctcagcctcctgagtagccggaactacaggcgtgagccaccgcacccagctaattttttgtattttagtagagacgggtttcaccatgttggccaggatggtctcgatctcctgaccttggatctgcccacctcggcctcccaaagtgctgggattacaggtgtgagccactgcgcctggcctgtttaacaataatattaataaaatagagcaattgtaactatgccagcatcactacccttgcactttggggccattattaagtaaaataaaggttccttgaacagaagccctgcaacagttgatctgataaccaaggtggctactaatgggtgagtagggttgcatatacagtgtggatatgttggacaaagggatggttcacatcccaggcaggaggcggcagggcagcaccagattttatgctactcagaatgacacacaacctacaatttatgaattgtgtatctctggaatatttctttctttctttctttttatttttttaagataagggtcttgctttgttgaccaggctggagtgcagtggctcaatctcagcccactgcaaccttcacctcctgggctcaagcaattctcctgcctcagtttcccaagcagctgggactacaggtaagtgccaccacgcctggctaattcttggggggtttttttgttgttctggagacggagttttgctctgtcgcccaggttggagtgcagtggcaaggtatcggctcactgcaccctccacctcacaggttcaagcaattctcctgcttcagcctcccaagtggctggaattacaggtgcccaccaccacatccagctaattttttttgtattttttagtagagctggggtttcaccatgttggccaggctggtctcgaactcctgacctcaggtgatctgcccaacttggcctcccaaagttctgggattataggcgtgagctactgtgcccagcctatttctggaatatttcatttaatattttcagacttgagattgaccacgggtaactgaaaccccagaaagtgagaacacagattggtgaggaccactgtgtgtaagatggttgtaagagccaaagagaaaaataaagaagacagtgtggccaggcgcagtggctcacacctgtaatcctagcactttgggaagccaaggtggttggattgctcaagctcaggggtttgagaccagcctggccaacatggtgaaaccccatctctaccaaaattacaaaaaagttagccaggcgtggtggtgcacacctgtagttccagctacttgggaggctggggtgggagaattgcttgagcccaggaggcaggggctgcagtgagccatgatcatgccactgcactgcaacctggccacagagctagaccctgtttcaaaaaagaaaaaaaaagaagtgtactgggaatggtggcttgtccctgtaatcccaaccacttgggaggcagaagcaggattgttaaggccaggagttcaagaccagcttgggcaacatagtctctaaaattaattatacaaagcttaaaaataaataatataaagaagaagatagtaggacctgtcatttcatgttggatcatcagagaaggcttgctgttacgtcacgtttgagcagagaccttaagaaagtaaggaaataaactatgcagattgttagggaagagcattccaagcaaacagaaaagcctatgcaaaggccttgaggtgggcaaatgccaatagagttggagtgcattaagctaggaaaaagagattaggtaggaagtggtacagattattctagaatcttgctcctcaaaatgtggtcctcagatcagcagtgttaatatcaggatctcatgatctgggagcttattagaaatgcaggatgtcaaggcccaggatgtcaaagctgctgaatcaggaaatctgtattttaagaagattcccccaggcaatttggatgcaattataagcttgagaagcactgatctctagagcctcgtagatcatggcaaaaacttgaacttcagtgtgaatgaacttgaaagccattgggttttgagcatgggagtgacatggtctgacattttaaaagattcactggcgactgtgttgagcagagactataagaggcaaggagagaagcagggatactagttaagtggctaatacagtaataccaagtagattggactggagggatagcaggggaagtggtgataaaacgactcaggatatattttcaaagtagagcttttacaggaatgctgatggattggattggattatagggttagtaaaggaatctgagatgagaatgattacaaggctttttttttttttttttgacagtcttgctctgttggctctgtcacccaggttggcgtgcagtggcgtgatcttggctcgctgcaacctctgcctcccaggttcaagcaattctcatgcctcagccacctgagtatctaggattacaggtgtgcaccaccacgcctggctaattttttttttttttttttttttttttttttttaggcagagtctcgctctctcgcccaggctggagtgcagtggcaccatctcggttcactgcaagctccgcctcccagggtcacgacacctggctaatttttgtatttttagtagagatgcggttttgccgtgttgtccagtctggtcttgaacttctggcctcaagtgatctgcctgcctcggcctcccaaaatgttgggattacaggcgtgggccaccacacccggccttacaaggctttttgacttgagcaactagaagaatgaagttgccatttactgagatggggtagcatatgggagggagaggtttagattgttggttatgtgagtgcagagttcaagggagaggttgtcagctaaagatacacatttaggatttaatactcagcgtgtagacagcacttaaagccatgagattgcagtgagtgtagatggagaagagcagcagtttgaagaccaagacctgagacagtccagcatttagaggctaggaggatgaagaagaaccagtagaagaaattaagaagcagtcattggggcagaaagcgaatgaaggagctaaatggacgctaaataaagagagtgtttcaaaaacaaaagagaggtcaactgcagattaactactggatttattgatgtcatagtcactggtaaccttgacaaagctgtttcaggagatggtgggggcaaaagcctgctaggaataggtttttaagaaaatggaatgacagagattagagatgatgaatttacataatgtatttcttttaagatgggcagcattatgtgtgtctatattgagtaggaatgatcagagagggaaaagctgatgctgcagaaggaagagggaacagttgttggagcagtgcctttagtaggtaagagagtacgtgatctggtacacggggaggagatggctttatcagaacatggacagtttatccacagtagcaaaaaaaaaaggcagagtgtatgtatgggcatagatgcaactagtgcaggtaaatatagagcttggggcagttgaaagttctcttctgtctgcttctgtttcctcaataggaagggaaagcctttaactgagagtgagtttgggaagaaggtcatggtgttatgagcagaggataggtgtgaaataattgcctagaagaaaacgaatagacttgggagtacgaatgcccacttcaggttagtagtcatgagtttaacgtaagactagtcagcttgtttctgtgtttttctcaggccatttttatttgtgtggtcacatgaatggagtaaccagaaagttggtttaacctagatttgccaggggagtatgtgttgttgttgttgttaattagtggaataagttacaagtatcacagtatctaacaataggggaatagtaaattaagatagatataaggccgagtgtggtggcactgcctgtagtcccagctactcagaaggctggggcaggaggatcgcttgaacccagaagtttgaggctgcagtaagctatgatcctgcactgcacttcggcctgcgcaacacaacaaaccctgtctcaaaaaaaattgtttacaaaggtgtttttgttgttgttgttgttgttgctttttttttgagacggagtctcactctgtcacccaggctggaatacagtggcactatctcggctcactgcaacctcctcagttcaagcgattctcctgcctcagcctcctgagcagctgggattacaggcgcatgccaccacacctggctttttttttttttttttttttgtatttttattagagacggggtttcaccatgttggtcaggctggtctcgaactcctgacctgatgatccacctgcctcagcctacaaagtgttgggattacaggcgtgagccaccacgtctggcctacaaaggtttctaatacacttactgtaatgctaaattttaaaaagcatgacagagaagtgaatatgtgatacaagctcaacaatggaaatacgatgtatagaaaatggactgagaaaaatatgctgttataactgaatgcctgagactggatatttataatgaaagaaatttattggctcacatttttttctggagactgggaagtcccaaatcaatgcaccagtaactggcaagggccttcttgctgcattgtcacagggcagaaggcagaagggcacaagtgaacccactccccagagccctttttataatagtatgaatatatcggtgaggggttgggcacggtggctcacacctgtaatcccagcactttgggaggccgaggcgggcagatcacaaggtcaggagttcgagaccagcctggccaatatggtgaaaccccgtctctactaaaaatacaaaaaattagccgggtgtggtgacgcgtgcctgtaatcccagctactcaggaggctgaggcgggagaatcacttgaacctgggagccggaggttgtagtgagccgagatcgtgccactgcacttcagcctgggtgacagagcgagactccatctattttttttttttttttaaaaaagatggtgaaaccccgtctctactaaaaaatagaaaaattagctaggtgtggtggcaggcacctgtaatcccagctactcgggaggctgaggcactgaattgcttgaacccaggaggcagaggttgcagtgagctaacatcatgccactgcactccagcctgggcgacagagcgagactccgtctcaaaaatatgtatatatatttgtgagggtggagccctcataacctaaacacctcccattagactccaccttccaacactgtcatgttggggattatatttccaacacatgaattatgaggggcacattcaaaccatacagcgtgctaagtgttgttctgactggtttgcatggactatctcattcagttttgacatatatatatacatatatatatatatatatatatatatatatatatagatatagatatatatatatatatataccattggtccttgaacaacgtgggggttagggatgacaacccctgtgcagtcaaaaatctgcatatgtaagttttgactgccccaaaacttaaacacttatagcctactgttgaccagaagccttacaagtaacataacagtttttttattttgttttgttttgtttttgacagagtcttgctctgtggcccaggatggagtgtggtggcgcgatctcggctcactgcaacctccacctgctgggttcaagtgattttccggccttagcctcccaagtagctgagactacaggcatgcaatattgcacctggctaattttgtatttttagtagagatggggtttcaccatgttggccaggctggtctcaatctcctgacctcaagtgatctgtccacctcggcctcccaaagtgctgggattacaggtgtgagccaccgcgtcgagccttaatacatatgttttttatgttatgtatattatttactatatttttgcagtcaagctagaggaaatgttattaagaaaatcataaggaaaatacatgttcagtattgtgctgtatttatcgacaccataagtttacatgatgaatcatgtaaaatggcaggcaaccacagctgcagacctccgtccatggtaccatatgaagcaatttggcttttcttgtaatgtcatgactcttttctgcttcttgggaacacttccagcatcactagtggcacttcattatgggtcccatggtgttatgtaaggtttatgatactgctttagacacatgaaaaatacctgaggaaccacaggagatcacttcttgctgccatatgcaatttttgttttgagacagagtttcactcttgttgcccaggctggagtgcagtggcatgatctcgactcactggaacctccgcctccccgggttcaagcgattctcctgcctaagcctcccaagtagctgggattacaggcatgcaccaccatgcctggctaattttgtatctttagtagagacagggtttccccatgttggtcaggctggtctcgagctcctcacctcaagtgattcacccgcctcggtctccaaagcgctgggatttacaggtgtgagccagcgtgcccggtctgccatatgcagtttactggagagacgaactgctcactggaagatgattaacatctcagagtttttaagcagatacttgcaacatttgagctcaccatagtatcgacaagaggcggctatgaaattattacagtactacagtgtgtactgaagtgaattttatgcagttatgatttaatactgcatctttaggccaggtgtggtggctcgcgcctgtaattctagcactttgggaggcctaggcaggtggatcacctgaaatcaggagttcaagatcagcctggccaacacggtaaaaccctgtctctactaaaaattcaaaaattagccaggtgtggtaaatataaaaattagccgggtgtggtggcatgcatctgtagtcccagctcccagggtgactgaggtgggaggatcgctggaacctgggaggcagaagttgcagtgagctgagattgtgtcactacactctagcctgggtgacagcaagaacctgtctcagaaaaacaaaaacaaataatattgcatctttatatttatttccgtttctcttgggctgtgaatgatgtcatgtactgtctgtgtttgtgtgtgaggttttttggtgttttttttttacatggggtctcactgtcacccagcctggagtgcagtagtgtgatcacagctcactgcagcctcagcttcctaggctcaagcaatcctcccgcctcagcctccagaacagctaggactacaggtgcaccccactgtgctcagctaattttttattttttgtggagatggggtcttgccatgttgcccaagctggtcttgagctcctgacctcaagtgatcctcctgcctcagcctctcaaagtggtggggttacaagtgtgaactatcacatccagcctgcatcaagttttgataagttttaactttataatagacatatatatttggccgggcacggtggctcaacccctgtaatcccagcacttcaggaggccaaagtgggcggatcacgaggtcaggagatcgagaccatcctggctaacaccgtgaaaccccgtctctactaaaaaagtacaaaaaattagccgggcatggtggcgggcgccggtagtcccagctactcgggaggctgaggcaggagagtggcgtgaacccaggaggcagagcttgcagtgagccgagatcgcaccactgcactccagcctgggcgacagagagagattccgtctcaagaaaaaaaaaaaagacatatatattttatggtagtaaatgataaaatagactaggatctacataaattttatgcgttcatgacatatgtagctttaaaaaaaaattagccagatatggtagagcatacctgttgttctagctactcaggaggctgaggcagcccgattgcttgagcccaggaatttaaggctgcagtaagctgtgattgtgccattgcactccagcctgggagacagagtgagactttgtctcaaaagaaagaaagaaaaaattccagtatatttactgaaaaaaattagcatattagtggacctacacaattcaaatcgtattgttcgaagattaattgtagacatacataggtgccttacttttctccagtgagagggcctaaaggcagtaatactctaatagaaatgagtgcaagtaatgcctagaatttggcttctacataccattattccgtaatagccaggattccaccaagaatggttgattacaggactgggccagggaaaatacaagatgagcccagaacatcttttattttatttatttatttatttttgagatggtgcctcaccatgttgcccaggcggatcttgaactcctgggcccaagcgattctactgcctccacctcccaaagtgctgggattacaggcttgagcccagcccatctcatgatacaagacagtcagggaacaaaaatgaagggaggctgggtgcagtggcccatgcctttaatccgagtactttgggagtgttgggaataacactcaaaatcctaaggaaaatgaacattcaaacaaaggattcttaggaaagcaattttacttctctgcagaggggtgcctctccttggccagtcgccgtgaaagcacacctgaacaaaggggcacgagagcctttattcctgacgcaagtcctgcccctgtacccttttcccatttgccggggtcgggttgcacaattagcccaattggctaaacatctgaactttctttagataaggtgggcacataagggagagaggggaaaaggtgaaggggtgtctgcaatgatctagagagctagtcttctttccaaataagggaaggaatagtaatagtaagaaatagtaagaaagaaaataaagaaatagtaataaaggaaagctagtcttctttccaaataaggaaaggaatgtgagctggtactgataagcctggtactgtggcgtgtccaggcatgtaacaaaggcagaaacgaaaaaaagagaaaaaggaaaaaaggttgtgggggagtgctatgaattaaagaatagaggattgatcaggctatttgaagagaaacctcatcatatcccacaggaggctgaggcagcagatcagttgatcccaggagttcgagaccagcctgggcaccaaagtgagaccctgtcgctacaaaaaattaacagaaaaaaaaattagctgggccgggcgcagtggctcacgcctgtaatcccagaactttgggaggccgaggcaggtggatcatgagatcaagaccatcctggctaacatggtgcaaccccgtctctactaaaaataaaaaaaattagccaggcgttgtggcacgcacctgtagtcctagctacgtgggaggctgaggcagtagggagtaggcagtaggatcgcctgagcccaggaggtcaaggctacagtgagctatgtttgcaccactgcattctggcctgggcaacaaagcaagaccctatcttgaaaaaaacaaaaaaatggaagcatgttcaaaggacacaggccaagttgaaggagatcgcagagaccaagtatgggacaatttgagcaggaaaataaatagtaatagtaatggattaaagcacagaataagacaaatatccctaagtccattctgctataaataagtgaataactaaataaagggaaagggacagctaatcgttacaatagcattcccattagtaaatgtagaaggaataatagagatagaaaatcaccatttagtaaacaccacagcagtaattgtggcaggcaagaatcattcatggatgcttcaattagtgggcaaaaatgtgatgtgaaacaggacatttacgtagtctgaaagtatcttcccacaaaaatactggttgcaaaggggaaaataataatgttacagtggagaaatgtggcagacactacgaagtgatcaaagttaacatcagcagtaataagacattcacttcatgcacctcttgatacgatgcctgaggaccaaccctcccttctgctgtaatcttacgaaaatacataacttcaatataatcgcgagaaaacaggccaacccaaattgagggacattgtacaaaataagtgacaagtactcttcaaagaagtgtcaagatgatgaaagataaagactggaggagaggaaggagacctgacaactaagtgcattgtgggatcctgaagcagaaaaaggacacaaataggataaactttttttttttttttaaaagatcctgagtttgtgttccctcctaactactgtaagttggacaagtcatataactactctaaggtgtaaagtaggcgtggtactgtctgcttttgctcaggtgtggtgaagctcaaacaaggctttaattgtaacacaaatataagatatcatcatcattattttattttatttttttttgagatgagacggagttttgctcttgttgcccaggctggagtgcaatggcacgatcttggctcactgcaacctccacctcttgggttcaagcaattctcctgcctcagcctccctagtagctgggattacaggcgcctgctaccacacccagccaattttttgtatttttagtagagatggggtctcacgatgttggccaggctggtctcaacttctgaccgcaggtaatccacccgtctcagcctcccaaagtgctgggattacaggcgtgagccaccatgcccggctctcatcgtcattataggttacattgaagtgaactgtttgtctcttttttgtgattctaccaataaaagcaataaacctagttttctgccatggatagaatttactgaaaaggtttctcttccctccaaattgatttgttttttccatcttcatagcttttcaggctgcctttcgagctcaggggcccctggctatgctgcagcactttgatactatctacagcattttgcagtaagtgaaacacccaactggtactttaaaaagaactggtgactgtttgtcctaactgtgcatgttagtcctgaaattccaagttataggttcactgataaatgcctctggatattgatatctctactgatgagcatgtacccagcttgccaccgtatttattcagttgaacaatttcacgtgtatttttaaacattcgattccacgggttagatctgatctgttagaaggggctctgcaggctccttcctgtctcacccccacactttctttccctcatagtcactttcgaagtatagatcctggcctcaaagaagatactctgcaattcctgataaaaggtgtttatgggtcagggggtaggggatggaaggtgtttgttatcgtttgtttgtttgtctgtttgtttgtttttcctacattttgtcagccacatgatgatatcaaggctgttgtgattcagttggtttggctaagcccagggacctttggcctgttaaaggtctgtaatcttggtgggcgatacagagttatgtgtgttcactgtaagggcagaccaacaagaactttttcctacttttgagctacctctttttaataggggtgattcttccagttgctggagagaaattgtggtaactggagtgagagagtaggaacagggcatgttcagggtatcagggccaagggtcctaaaggacttagcttgtgttatggccactgagagatgaaacacagatctttggtaatctgatggctgcaagtgctgggtgttttgaagttggggtatatgaaagaagtgagtgaaactgactccaagattctgcccctcacagtggtatcccgccactcccaggagcttccagctatcctggatgatacaactttgagtggatcagatagaaacgcccatctaaatgccctcaaaatgaactgttatgctctgatacgtctcctggaatcctttgagaccatggccagccagacaaaccttgtggacctggaccttggtgggaaggtaatttggagttttgggctcacgttatatggggtctggggagataggggaatagatggaaaagaagggaatccaatgatccacaaatcctttctgtcctcattgagaatttaggagaaagaactcaaaagtgtcacacgttttcttcctggacaagtagcgctgtggaacttgtaatatttcttccgtattaccttctatgttgtcttggtactagattgtttgggcactcagactgacagatcttgacccacttttttcccttattttttcctcaatgtatacatgatcctttttagggtaagaaagctcggaccaaggcagcccatggctttgactgggaagaagagaggcaaccaattcttcagcttttaacacagctacttcagttggacatccgtcacctgtggaaccactcaataattgaagaagaatttgtcaggtgggtagggaggatggctacagataatactgagctgtgagagtgaggctctgttgatagatatgccgtttttttggttttgttttttttttgtggggggacagagcttcactcttgtcgcccaggctggagcgcagtggttcaatctcggctcactgcagcctctacctcctgggttcaagcaattttcctgcctcagcctcccgagtagctgggattacaggtgcccgccaccacaagctgatttttgtatttttaatagagacgggttttgccatgttggccaggctggtcttgaactcctaacctcaggtgatctccctgctttggccccccaaagtgctgggattacaggtgtgagccaccacgcccagccagaagtctatttttaaaataagtaaaataagtttgatggaagaaggttgtgattttaaatcagctactctaggcccggtgcggtggctcacgcctataatcccagcactctgggaggccgaggcgagtggatcacctgaggtcaggagttcaagaccggcctggccaacatggtgaaaccttgtctctactaaaaaaatatgaaaattagctgtgcatggtggtgtgtgcctgtaatgccagctacttgggaggctgaggcaggagcatcacttgaacctgggagagggaggttgcaatgagctgagatcgcaccattgcactccatcctgggcgacaagagcaaaatcccgtctcaaaaaaaatagatagggccaggcgcggtggctcacgcctgtaatcccagcactttgggaggctgaggcaggtggatcacgaggtcaggagatcgagaccacggtgaaaccccgtctctactaaaaatacaaaaaaaaattagccgggcatggtggcgggcgcctctagtcccagctactcaggaggctgaggcaggagaatggcgtgaacccgggaggtggagcttgcagtgacctgagatcgcgccactgcactccagcctgggcaacagagcaagactccatctccaaaaaaaaaaaaaaaaaaaaagatagatagatagatagacagacagacaaacagacagacaagctactctagtaagacttctttgagatggtgacatttgagcaaagacccagaggaggtgactgagagctatgagaatatgtggaggaatagcaagggcagggaaaaggaatagcatatgcaaagaccttgaggagggagcatgtccagcacgtacgagcaatagcaaggaggccagagagctgacagctgagagcaggtacgagggttaggccgtgaggccatgggagcagtggggagccagaccgcaggttcttgtgggccatcatggtgactttggcatttcctcagaatgaagtggagccactggggagccacaagcagggaggtgaggtgacctgacttgtacttcaacagggccatcctagctgttgtattgaaatcgactatggagggaaaggggaagcaagagaccagttaagaggctgttccaataactcaagcaagagatgatggtctcttagaccaaggcgtggcagtggagatggggagaagtagttggattctatactttttccttaaggtagagcttacaggatttgctaacagactgggtgtgaggtgggagggagagttcagtcaaggatgactctcccgggttttggtctgagcatttggaagactggagttaatggtaactgagatagggagaaggctgtgaataggtgttttgggaggaagatcagatgttctgttttggacatacaaagtttgaggtgtttattagccacgtaaagtcagatttggacgttgaatatatagatctggagttcaggagagaggtctgagctagagataacacatttgggaatataatagtattcagagccgtgagactgaatgaaattaccaaatcagtaagtgtagctaaaagagcaggaatccaaggactggtaccctagggcactccagcattaagagtgaggatgccgggtgcatggctcacgcctataatcctagcactttgggaggctgaggcaggaggatcacttgagcccaggagtttgagatcagcctggacaacatagtgaaactgtgtctctacaaaaaatagaaaaattagctgggcatggtggaggctgaggtgggagcatcacctgagctatgaggaggtcaaggatgcagtgagccgtgattgcaccactgcactccagcctgggcaacagaggcagaccctgtctcaaaaaaaagagtctgaggaggaactagccaaagaaactgagaaaggagtcttgttcttgtgtcctggaagcgagataaagcatatatttcaaggagaaagtgagtgattaactgtatcacatgcagctgtgaaagaccacttgagatgcagattgaatcagtcgttatatttaggaatgagaagtcattggtgactttgtcttttttttttttttttttgtgatggagtctcgcaatgtcgcctggcctggagtgcagtggcatgatatcagctcactgcaacctccacctcccaggttcaagggattctcctgcctcagcctcccaagtagctgggattacaggcgcccaccaccacacccagctaattttttgtatttttagtagagacagggtttcactatgttggccaagctggtcttgaatgcctgacctcgtgatccacctgcctcggcctcccaaagtgctgggattacaggcatgagccaccacacccggccaactctatcatatttttatgatatatttaggttctttgtcagcatcacaactggttgaaagttggtaatcttgaaggaaggagtacctaactggggtcagcaaagcaaagcaacttgttatagaaagtaatggctagaataaagaaaaccctgactttgggagcagtagggatagaatgaatgaggcagggctctgatacaattggattcagacagctgctttcatcatctcaaactcttcctttctcagtttggttactggctgttgctaccgccttctggagaatcccaccattaatcaccagaagaaccgccccactcgggaagccataacacacctgcttggtgtagccttgacccgttataaccatatgctcagtaagttaccagtcgctttgccccgccttttttgtattgcccataatttctcatgtttaatgcttccacaggtgctacagtgaagatcatccagatgctgcagcactttgaacacctggcacctgtactggttgcagccgtgagtctatgggcaactgactatggaatgaagagcatagtgggagagattgtaaggtgactcttccttctcgaagtttctcatgcttattttccttggggagggaataaagaaagattggaaatacattatctgtgcaacagtagattccttcagatattagatacctgtcttaccttcccttactgggaactgaataattgatctatgttgctatggctgtgttttcttccctgtgtagagagattggacaaaagtgtccccaagagctgagtcgagacccttcagggacaaagggctttgcagcattcctgacagaactagcagaacgtgtcccagctatcctgatgtccagcatgtgcattttgctagatcacctggatggagaagtaggtggtccactaggggtcactgagctttttctggggattttaagtccagtgttgaaaggctgtttcttaacagaacaagaaagtagctttgacaagttgtctagatttatcattgtgacatttcctttctgtagagaagcaggtcaagtttgttgaataaggagctctttattaatctgttaatctttcaattcacattgcttttatccagttctggtaagggagatgacatttctgcagcttaagtctagtaagagcaactcagctttgattttttttttttcttggaggtaggatctggctctgtcacccatgctggagcatgatcatagctcattgcagcctcgatctcctgggctcaagcaatcctcccacctcagcctcccaagtagctgggacttcaggcacatactaccatgcctggctaatttttttagtttttgtagaggtggggtcttgccatattgcccaggctagtctcaaactcctggtctcaagcaaccctcctgcctcagcctcccaaagtgctgggattgcaggcgctaccatgcttagccttcagctttgattctgagtcccatctgttcctcaggataaagcgtcttcccaccagctggcttgccttgcttcctcaaacaatgaactttctcaaatcaacccatgtcatctctctcaattctcttttatgcctgaatgctaacctggctgattcccatactgatgttgggcactcctaggtgaatgtcaaggacaaagacagtccacttgttcatctcatttactttaactttttgtgcaagaccctattctctggttcttagcctggcaaaaccttaaccctgctctccactagattatgtattggacttgctggcactcttaaggctgatttccatgtttctgtctcattttctgtcagtaaagcatctgaaggagagtgggagggaaaggaggggatatttattagtaaggattaaagactttgaggccaggtgtggtggctcacgcctgtaatcccagcactttgggaggctgaggtgagtggatcacttgaggtcaagagtttaagactagcctggccaacatggtgaaatcccatctctactaaaaatacaaaaaaaaattagctgggtgtggtggcgcgcacctgtaatcctagctactcgggaggctgaagtgggagggttgcttgaacctgggaaatggaggttacagtgagccgagatcgcaccactgcactccaacctgggtgacaaaacgagactctgtctcaaaaaaaaaaccaaaaaaaaccacacagacgggcgcggtggctcacgcctataatctcagcactttgggaggccgaggagggtggatcacgaggtcaggagtttgagaccagcctggccaatatggtgaaatcctgtctctactaaaaatacaaaaattagctgggtgtggtggcgggcacctgtaatcccagctgcttgggaggctgaggcaggagaatcacttgaacccgggagtcagaggttgcagtgagccgagatggcgccacagcactccagcctgggcaacagagcaagactccgtctcaaaaacaaacaaacaaccacaataacaaaggctttgagacctcagctgaagggtagttaataaatgcttttcaaatgtgtgttggtgagtggatgtgatttttttattcagctactaccatgctttcctgtgtgagccctatgaggaaaaattggttttggcccttgttctagcattctctgagcaacaagtcctctttgggattcagctttctcctgtgaccttgggagtgaatacctaggcagttaatggaaaaagttatggccaagcacaagcaagcttcgccttgactaaaggtttgacccctctatgcttctctctcttagaattacatgatgcgtaatgctgtgctggcagccatggcggagatggtgctgcaggttctcagtggcgatcaactggaagcagcagcccgagacaccagagaccagttcttggatactttacaagcccatggccatgatgtcaactcctttgtgcggagccgtgttttgcagctcttcacccgaattgtccagcagaaggtaaccaacttctatgtggcaaaaacatatggtacctctccatataccagtgtaaagaggaatccagtgttgaagataaatatctgccccaaagaggtctagaattcacatttttattatcagtagtaaaagtcttcctctaccaaggacgaggatatctggctccctttaaggactgtaatgtgtcttaccactacaaggagtactcctaatctatattctgtagaaagggtttttagagtgagtgggtagctcagtttagagtatacttaaagatcatcttgaacaaaatggatgatgtgggacttgagcagattcttctcttcctaccctacacaggctctccccctgacacgtttccaggcagtggtggctttagctgtgggacgtctggcagacaagtcagtgctagtatgtaaaaatgccatccagctgctggccagttttctagccaataatcctttctcctgcaaggtaagtagacttggtccaccaaaagagaaggaattaaatggaaacagggatgaaattatgtcatttactgaccctgctattcattttacctgatagcttagtgatgctgaccttgccggaccactgcagaaggagacccagaaattacaagagatgagggcccagaggcgaactgcagcagcttgtaagtagttactgccttggagtcctaatgccagacaggcttctccttgcagtcagaaactctagtgaaagagactaagtgacactctcatttagctgcagtgctggacccagaggaggagtgggaagccatgctgccagagttgaagtctaccctgcagcagcttctacagcttccccagggagaggaggagattcctgagcaaattgccaatacagagacaactgaagatgtgaaaggacgcatctatcaactgcttgccaaagctagttacaagtaggcaaaagaatgggatattcttcgtgatctgtttatgtttagagttaacctttgagaaacttacataatgtgtcttttaaattaactgcacacagatatgctgccaccaggtgatggtagatgttttcatgtagtaatggtctgaccataggcctagtccacaattaagcatgtgtttctactttataaatgtttaaaaaaactactgaaacaattaaatgttaacagtattataatcaaacatgagtactccttcaattgaagaagagcacctataaataagttctagttgtatgatcttgaataagttgcttaactttctgtgcctcggtttcattatctataaaataagaaattgattagatcttatgatctctaaggactttctaattctaaatttcatgaactaataatatcaaacatgcttaatactaccttaatcttcaaacctagtatgaatcctgatcttagagaaaagatttctcctagtgtttttgtgactctagaacttaacaacaaaagcccttacagccgtcaacaagttttttttttttttttttttttttttttttgagatggagtctcactcactctgttgcccaggctgcagtacagtgacacgatcttggctcactgcaacctctgcctcccaggttcaagcaattctcgtgcctcagcctcccaagtagctgggaccacaggcgcgcaccaccacaccgcactaatttttttatttttagtagagacagggtttcaccatattggccaggctggtcttgaactcctgacctcaggtgatccacccatctcagcctcccaaagtgccatgattacaggcgtgagccaccgcactcggctgccaacaagtattcttaaacctcagccacaagttatttgttatttatttacttcttacctaattgggctgaattttttttttggagacggagtcttgctctgttgcccaggctggagtgcagtggtgcgatcttggctcactgcaacctccacctcctgggttcacgccattctcctgcctcagcctcccgagtagctgggactacaggcgcccgccaccacgcccggctaatttttttttttatatttttagtagagacggggtttcaccgtgttagccaggatggtctcaatctcctgacctcgtgatccgcctgcctcggcctcccaaagtgctgggattacaggcttgagccaccgtgcccggcttgggctgtttttagaaggctagagagtggcttgtttgccctatgactcccttatgttactttagtgtctctctttttattttgctaaagcaaaaatagagactatagttttataagtgcatgttccaccaagcattctagtattttctcctgtcaattagaaaaggattgtttgtttttgagacagaatctcactgttgcccaggctggagtacagtagcgcaatcacagctcactgcagcctctcactgtagcctcaaccctgctgggctcaagcgatctcccacattagcctcctgagtagcctggttaatttatttataatttgtagctgggattacaggtacacaccaccaggcctggcctttgccagcctgggcaacgtggcaagaagataacatgtagacaagcagtcaaacatgtattctttttttcccccttttatatgactgatagaattctctgcccactgatctaccatcttgtttttttcacttaactatgtgtctcagtggtttttaaaaatatttatggctgggtgcaatggctcatgcctgtaatcccagctacttgggaggctgaggcaggagaattgcttgaacccaggaagcagaggttgcagtgagctgagattgctccgctacactctaccctgggtgacagaggaagagtccatctcaaaaaaaaaaaaaaatttatagatggccaggtgcagtggctcacacctgtaatcccagcaccttgggagcccaaagctggtggatctcttgaggccaggagtttgaggccagcctggccaacgtggcgaaatggcgaaacccatctctgctaaaattacaaaaattggccaggtatggtggcacgtacctgtaatcctagctatttggggagctgaggcatgagaatcactcaaacctaggaagcagaggttatagtgagccaagatcatgccactacacttcagcctgggtgacagaacaagactctgtctctaaaaaaaaaaatatatatatatatatacacatatatatttatacataaatagtttcccactctcctctttttttgagagagagagtgtctcactcttttgcccatgctggagtacagtggtatgatcacaactcactgcagctttgatctcccaggctcaagtgatcctcccacctcagctccctcgagtagctgagaccacaggcacacaccattacacccacaggcacacaccatcacacccacaggcacacaccatcacacccacaggcatacaccatcacacccacaggcacacaccatcacacccggctaactttttttactttttgtatagttgggtctccctgtgttgcccagactgatctcaaattcctgggctcacgtgtccccattattttttatgactacatagaatcttattgtctggatgtgcctgaattaactaattattgaaagtttattgtttctaaacttaggaaagtttttaaacaggtgtttggagtaggtttatgattttaaaactttaaaaagccttattggagtttttttgaagactgtagtaatgccttgtaggttcagaaataggaaaagtgtttgcagatgagcagtcaggggaaaaaaataggcaaagtgttttgagccctaccccttagtaggtgctgtaacaactttttaagcatgttaagtgctccttttctctgggcagtaggtccagggacttgatagaatcatgaggtaagctcccttacaaacggctgcagtgacattcttctgggtactgacaggctggtgttctttcagaaaggccatcattctcactcgagaagccacaggccacttccaggagtccgaacccttcagtcatatagacccagaggagtcagaggagaccaggctcttgaatatcttaggacttatcttcaaaggtaatcattttccttcttcagtcaataaataacacatgtcaactggtatttactgagcattaactttatgccatcattggcctggttaacagaacctggtgctgaagagcccagagatgaattggcattacttttgctctggaatggaagcagcccacgggcctaagattgatagtcacagggtgactgtccagaccatagcggtctttaggtatggtttttgagaaatttagatattttagagtaagttttaatttcatatcttcacattgtgaaaagagatatccagggccagatgtcgtggcttatgcctgtaatcctaacactttgggaggccaaggcaggaggattgcttgagcccaggagttgaaaatcagcctgagcaacatgacgaaacccccatctctacaagggataccaaaaaaaaattagccaggtgcggtggcacgcacctgtagtcccaactgctcaggagctgaagtgagagaatcaccttagcccggggaagttgaggctgcagtgagcggtgatcattgccactgcacagcctaggcaacagagtgagaccccatctcaaaagaaaagaagaaggaaaataaataagtaaatatccaggaatgttgacagctgttggattcccctgtatccccttgaacgaaaccatcctgtacttctctaactccttaggcccagcagcttccacacaagaaaagaatccccgggagtctacaggaaacatggtcacaggacagactgtctgtaaaaataaacccaatatgtcggatcctgaggaatccaggggaaatgatgaactagtgaagcaggagatgctggtacagtatctgcaggatgcctacagcttctcccggaagattacagaggccattggcatcatcagcaagatgatgtatgaaaacacaactacaggtatgccagagtccctttctataaggacagccttggggttcttttggattttttaattttttaaatttttattaacaatagagatggggccttcctttgttgctcaggctggtctccaactcctgggctcaggcaattcttctgcgtcagcctcccaaagtgctggtattacaggtgtgagccactgcacccggccatggatcttggagttcttttccatattttattgatatatctatctgctcctttaaaaggcaggggttctcggctgggcgcgatggctcatgcctgtaatccctacaaaactgggaggccaaagcaggaagacaggttgaggccaggagttcgagagcagcctgggcaacatagcaagaccccatctctacaaagaaacaaaaactaactgggcgtgatggcacgcacctgtagttccagctactcggaaggctgggcaggaggattgcttgagcccgggagtttgaggctacagtgagctgtggtcatgccactgcactctagccggagcaacagaataagaacctgtgtcttaagaaaagaaaaaaaaaaggcaggggttctttttttctgtttgcttcctctagccacttacagcttatacattttaatgcatatagtatttcatgataaggcatcataggaggagtcgacattctcagggaaaatgcggaaggcctccatttgcatcttgctacattcagaaaggttctgtcgttaggtattgggggagttttgtgaagtagataggtgacatttgtacatgttctctcagtggtgcaggaggtgattgaattctttgtgatggtcttccaatttggggtaccccaggccctgtttggggtgcgccgtatgctgcctctcatctggtctaaggagcctggtgtccgggaagccgtgcttaatgcctaccgccaactctacctcaaccccaaaggggactctgccaggtatatggggtgcttttgcctttgctgacttttccaaggtcagcttctcacaggacttcccttgtctcctaaaggaagaggtgcatttctccaggggagttccagatccataggcagtccatcatagtggggcttagggtggggctcggtttccagggagagcagttttgtagcactgtggtgggatagccctaatcactgtttgccaagttcagcttcccaatcttatagtgaccgctgatctctgctgttcccacagagccaaggcccaggctttgattcagaatctctctctgctgctagtggatgcctcggttgggaccattcagtgtcttgaggaaattgtaaggcttcctgctttctctttctttattcattcaacaagtattttggttgtttttttttttttttttgagacggagtcatgccccattgcccaggctggagtgcaatggcacaatcttggctcactgcaacctccgcctcccaggttcaagcaattctcctgcctcagcctcccgagtaactggaattacatgcatgtgccaccatgcccgactagttttttgtatctttagtagagacggggtttcaccatgttggccgagctggtctcgaacccttgacctcgtgatccacccgcctcaacctcccagagtgctgggattacaggcgtgagccaaagcgcccggcaacaagtattattgagttattactatgtatttagcaatttacttagctccagaaagaagtataagactatttgctttcatgttcccaactttaaaggaaccaacagtctagttggtagtgaaaaaccacagaacatttttagaacaatgcagcaggtagataataaagtgccagaatgagttgtacgggtaatggttgtcatagcaataataacaacctcacttatatggtattgaatatatgacaggcactcacacgttactcacagtaacttgtttaatcctcacgacagccctgtgaggtagcattatctgcattttacaatgagaaatctgaggcacagagaagttactgaacttggctggttacagctagttagtggcaaagtttgagattcaaactcaggcaataagagctctagaaaacatactcttaacttctgtgttctactgagggatacagagtaggaaagagagcggtttggggtagaatggtcaaggaagcttcctgaaggtggtaggacttaagctgggtcttgaaagatgagtaggatttagagaatcagagcaaggagggagggcatttcaaacagaacccaagaaagagcacagttcacattgtagaacaaagaagactgtgttctggttcaaattatctggaaaagaccaggcgcgatggctcacgtctgtaatcccagcactttgggaggccaaggcagcagattacctgaggtctgaggtcaggagttcgagaccagcctggtcaacatggcgaaaccccacctttactaaaaatacaaaaaaattagccaggtgtggtggtgggcacctgtagtcccagctacttgggaggctgaggcaggacagttgcttgaacccaggaggtggaggtagcagtgagccgagattgcgccactgcactccagcctgggcgacagagggagactctgtctcaaaaaaaaaaaaaaaaaaaaaaatctggaaaagataataaagttgtgaatgtaggttggaactaaactgtggaagtccctgaatgacttcaggagtctaggactttaactgtgttagccaggcacccagcattttagtgagacattctgctttgtagcatttgcattgcgggcacagagagtggaggtggcgctgggaagcgtgctcctgccagccacatttttctcctcactggggaaaagaaaagagcctggtggtggtgattggccatgatgtcataggtcagttaccggcaaaagccctacaagaggcaggggagagcacctgcaaactggggtgcaacagaagggacgtggggaagcagaggctgaggagaccaacccatgggaaggaaggcccgtggaggctgctgcagtgggcagtaacgaggggctggacttgaggattggagaaatcactgcagaatgggcttaatggaagacaaatttttaaaggaaaaatagtgactgatttgtaaaaaaattagatgaccgaaattttaagcacatattactgatagagtgttgataccactggcaaaatgaaaaggcaaggaaggatgatggcttccatgttggacatgttgagtttgtggtaacggcaagaaaacctgttagaaatctccagacttagaactatggacccacgtggaactcaaaaggtcagtttcgatatgtcacttgaataaaatagttttgaaggcatgagagtagaaaagtagagaatggaaagcctctcaagaccctgctgtacattttgaacctcctcttttctttttctcttcctaagtattacttttgtctacttcaggttcgcaatatcatcttcagaaaagcagaccaaagatcaaggaattgttcatttttggcttgagccctttttcttttctctttagctctgtgagtttgtgcagaaggatgagttgaaaccagcagtgacccagctgctgtgggagcgggccaccgagaaggtcgcctgctgtcctctggagcgctgttcctctgtcatgcttcttggcatgatggcacggtgaggctcaaatctagcaggcaatggggtgggagagcaaaggaaggttctgagagggctccttttccttcagtgacattgtcacagtgaggcccaactgagctctgctgtgagttataacgccacctaaatggaaaagcaaatagtgagaggaccagccctcctgcctagtagtagtgggattcagtaaagcaacaggacccaagaggctggccctgcggcagagccacgctatagtgctccacggctctagacaccacatgaggtgctggtacctacccctattggccctttctcccccgatgagtccaatccatgactgcctttaactctgtggcttccttcccctagaggaaagccagaaattgtgggaagcaatttagacacactggtgagcatagggctggatgagaagtttccacaggactacaggctggcccagcaggtgtgccatgccattgccaacatctcggacaggagaaaggtatgtgggggtggttccaaactaaggagagtggagattctcgtgtccaccctgtacacacacccacgttgtcttgctctccacagccttctctgggcaaacgtcacccccccttccggctgcctcaggaacacaggttgtttgagcgactgcgggagacagtcacaaaaggtgagctctcagggaaggccttgggcagaattgggccctttgttgcagtaaacaacttctccctcctcctctgcaggctttgtccacccagacccactctggatcccattcaaagaggtggcagtgaccctcatttaccaactggcagagggccccgaagtgatctgtgcccagatattgcagggctgtgcaaaacaggccctggagaagctagaagagaagagaaccagtcaggaggacccgagtaagtgggcaggggttgacccactgcggcagccagcttctgttctccctgcagggccaggagccactgccaccaccactatctgcaacaacccttagtgtacactgtgtcgtttttgtctaagttgaagttgggccagttcccacccccaactcttactacttcactagtttgaatagcacgtgagcaaggggaagatcagtaaaaatcggattcaggtttgatgggacttaaaaatgtctctttgccccaccttccctctccctctcctccagaggagtcccccgcaatgctccccactttcctgttgatgaacctgctgtccctggctggggatgtggctctgcagcagctggtccacttggagcaggcagtgagtggagagctctgccggcgccgagttctccgggaagaacaggagcacaagaccaaagatcccaaggagaaggtgtgtgaatgtcctcagcacttcccagatttatttcatacctcagctcagaactgagctgatccccttccggcaatctctgctcctctgctattacatgaagcgaagagtttctgcctctctgtggctactaccgtaggaaaggttcgtgtgaacaatgacgaaactgtcagtgatcacccaggaaggaaagatttaggtaaatgcagagtgtggagttagagacctcagcataaaacagaggctttgtgtctgaggcagggtttgttagaacacgcacgtacccgccggccttttccatcagcttccattgctggcctggccccggatggggccctgtgttccctccactagaggcaatgatgtcttgcagacaaataagacacagagccttgcagcgctggagaaaagtctgacctctgtgactttgaaccattgtctggcgtgatccatctgtttaccatatataggaaacgatgtcttccatgaggaagaggtgcagaaacacgctttggcaacttaaaacaaatggggacctcattgttcccctgcttaattcaggaatcctttctctttacagacacatttgacaattctctaaatgtttttgtagaatttgcccttcctcactttgttcatgcaaaacaaagtatgggctggaatcaaaaatgttgtctctgcttatccatgatccccaatttcattccctttagaatacgagctctgagaccaccatggaggaggagctggggctggttggggcaacagcagatgacacagaggcagaactaatccgtggcatctgcgagatggaactgttggatggtaagaaaaatggctgcactcagcagtttcttcccaattaagataacctgtcccaaacctgcagttactcttccaacaggcaaacagacactggctgcctttgttccactcttgcttaaagtctgtaacaacccaggcctctatagcaacccagacctctctgcagctgcttcacttgcccttggcaagttctgcatgatcaggtaggccgtggggttggtacccccttctcaaggaagatggggatgaaatggcttccctaatgatcctcttcttgctcttagtgccactttctgcgactcccagcttcgtcttctgttcaccatgctggaaaagtctccacttcccattgtccggtctaacctcatggttgccactggggatctggccatccgctttcccaatctggtggacccctggactcctcatctgtatgctcggtaagagacccctcacaacgtggtggcagttcccaggagccccggagtctgttgagagtcagtgtgagaatcaccagggctcttcccctaggctttggcatcaccgcgaacatctgcttgatacttgacctgtacaggcccctggctaagagtcaccccagtgggactgacacttctggttagaagcttcacctctttcccccactccagctttcaactctagacagctttctgactgcttctggagtggcagagcatgggataattgattcctgctgagggccttttctaccagtgttagggtgtagcccggaggtctcggtccccatgacccgcaattccattcctagtctccgggaccctgctcagcaagtgcggaaaacagcggggctggtgatgacccacctgatcctcaaggacatggtgaaggtgaaggggcaggtcagcgagatggcggtgctgctcatcgaccccgagcctcagattgctgccctggccaagaacttcttcaatgagctctcccacaaggtgagaggcagagaggcactgagggctggctgcagagggaatctgtaggtcacctcatctccttaacatggctctctctgtcttacagggcaacgcaatctataatctccttccagatatcatcagccgcctgtcagaccccgagctgggggtggaggaagagcctttccacaccatcatgaagtattgctccccgggccctggggcacattttccacatagcacgggcttaggaatcagacacacctgtatttgaattccacctcggctactctttagctgtacagccttcggcaataacttagcctctctttgtgcctatttcctcttcttttgaggctgatgatacttaacccttagttcttgaaaatattaaatacgataaagttcctaacatggtggcagacatacagtagcactcactccctagcagctgctcctgttaatttccattcacagtgaaaattcctgagccgggggcggggtggggtccctctctgctgaatgggacagggcaaggggagtggtgaggcagacaggggccgtggcagagaacatcagagaagacgagtgctgggggagggtccagggttggtcttagtggatggcagagctggccctgggccatcgaacatcctcatctccccttcctgcagacagctcctctcctacatcaccaaggacaagcagacagagagcctggtggaaaagctgtgtcagcggttccgcacatcccggtatgctgccctccctgagggttctttgtgctgagcggggccctgcaggggagaaaggcccatccctcaccccttcaatgcccccactgtggcatccctgggactggggaggctgatggggaaggttgagcctttactagctggatctcccagttcctcacaaagcccttcctatctgcagaactgagcggcagcagcgagacctggcctactgtgtgtcacagctgcccctcacagagcgaggcctccgtaagatgcttgacaattttgactgttttggagacaaactgtcagatgagtccatcttcagtgcttttttgtcagttgtaggcaagctgcgacgtggggccaagcctgagggcaaggtgagcagcacaggacacttcaatgcctgttgggttctgggctggctaagacatctgccggccctgggcagcatacggctcttgcagtcaccttcccgtcctccttatccccagctgggttgcaaccaaattgccagagtgacctaagaccagatctttgtctccagttctttttttattactccaaaaacacaaccaaagcagcatctcatccaattcttgtttgtttgtttttaatagtttttatttttcagagcagttttaggttcaaagcaaaattgagcagaaagtacagggagttcccttctaccccttgcccctacacatcacagccttccccaccttcaacatcctgcaccagggtggcacatttgttacagctgaacctacacttacacatcatctcctaaagtcatggtttaccttggagttcactgcacgtaatgacatgtacccaccattgcagtatcatacagaagagtttcactgccttacaaatcccctgcactccacctatttatccctctctccccacaacccctgatctttttactgttgccatcactttgtcttttccagaatgtatcattggaatgatccggtatggagccttctcaccttggcttcttagtaatgtgcgtttaaggcctccatgtcttccatggccttgtttctttttaatcagaagtaactgttttcaggcctgctctgaatctccttttctccctccaggctataatagatgaatttgagcagaagcttcgggcctgtcataccagaggtttggatggaatcaaggagcttgagattggccaagcaggtagccagagagcgccatcagccaagaaaccatccactggtacgtaaggcagcctgtgcgggcgagaccagactgggccctcccctcctgcagtgatttgtttcttcttcttttttaaatcacgttttcctgccttttctaggttctaggtaccagcctctggcttctacagcctcagacaatgactttgtcacaccagagccccgccgtactacccgtcggcatccaaacacccagcagcgagcttccaaaaagaaacccaaagttgtcttctcaagtgatgagtccagtgaggaaggtatgatgctcccgcctgttcccggccgagaaggcacacagctagggtgcagagggctggtttccataggacctgctgcgggggcctgagtgtagatgctctgccccactgccgcagaagggcctctcctgtacagcttggattttatttcttctgtgcggtgtgggattgtctcacttgttctctgatatctattttttcaccatctttgtgactcagctttttcttattcctttaattctttgcatagatctttcagcagagatgacagaagacgagacacccaagaaaacaactcccattctcagagcatcggctcgcaggcacagatcctaggaagtctgttcctgtcctccctgtgcagggtatcctgtagggtgacctggaattcgaattctgtttcccttgtaaaatatttgtctgtctcttttttttaaaaaaaaaaaaggccgggcactgtggctcacgcctgtaatcccagcactttgcgataccaaggcgggtggataacctgaggtagggagttcgagaccagcctgaccaacatggagaaaccccatctctactaaaaataaaaaattagccgggcgtattggcgtgcgcctgtaatcccagctactcaagaggctgaggcaggagaatcgcctgaacccagaggcggaggttgtagtgagccgaaatcacaccattgcactccagcttgggcaacaatagcgaacctccatctcaaattaaaaaaaaaatgcctacacgctctttaaaatgcaaggctttctcttaaattagcctaactgaactgcgttgagctgcttcaactttggaatatatgtttgccaatctccttgttttctaatgaataaatgtttttatatacttttagacattttttcctaagcttgtctttgtttcatctttcacattagcccagtttcatgcagcagagagagggttatcagtgcagagagagatgagtgagcccagagtcctagggcctgtcccgggatggcagatgagcttcctgccccgtcactgccacctttcccctctcaacctctggaccctgcacagtgaccagacagcctctctggggagaattatgcagtgcctaggctccagatcagtgcttctgaaccgggggcaattttgtctgccagaggacatctgacaacacctggggcctgttttgttgtcatagcctataggggaagaatgctaccagcatttgtgggaagaggccagggatgtggctcaacatcctgcagtgcacaggatggcccctcaacaaagaatcacacggcccacaatgtcaatagcgtcacagttgagaaaacctgctctagaccaagggttgctttctgccgtgtgcctcaccccacccccactcgtgttccctaatcccatctccaaaggttggcagcagaccggcccaggctcgtggaagttcagatcatgatcccctccagctctgcaggagacaagacctgtctcccagcattcctcattgttcccgggtctgcagagggcgtgagctatgctgcaggcgggctgccccctgaagcctgcgcacccctctccagctcctcaagtcttctctgctgagtcaccttcgaaccggaggctgtgagctggctgtcgtgaccacactggtgcctctgctgtcatgacaacagcacactacgtcagtagtgctccctgggcactgagctccctctttgcggggagaagacagtaatgaaaaatgacaagcatgaggcagaggggaagatcacgcttgggtggtgcaggagcatggaggtgctcttaatgctctcaatgagaaagggttaacggtcctggttgcaggaatagctgagtcagaggtggggcttcctccactcccccaccccacccctttcaccattagggaccttcttgccttgctcttgctactctgctctgggtggtcattgtgaaaagcccgcaccaaccatgccagtggcagccagacgaggacacagcctggctctgggtcccagcaggaaaggcaatcccagaaaggcagggtcagggactggagtcctgtgggtgctttttaagcaaagattatcaccaggcaggctaaacttagcaaccggcttttagctagaagggcagggggctggtgtcaggttatgctgggccagcaaagaggcccgggatccccctcccatgcacctgctgatgggccaaggccaccccaccccacccccttccttacaagtgttcagcaccctcccatcccacactcacaaacctggccctctgccctcctaccagaagaatggatcccctgtgggagggggcaggggacctgttcccaccgtgtgcccaagacctcttttcccactttttccctcttcttgactcaccctgccctcaatatcccccggcgcagccagtgaaagggagtccctggctcctggctcgcctgcacgtcccagggcggggagggacttccgccctcacgtcccgctcttcgccccaggctggatggaatgaaaggcacactgtctctctccctaggcagcacagcccacaggtttccaggagtgcctttgtgggaggcctctgggcccccaccagccatcctgtcctccgcctggggccccagcccggagagagccgctggtgcacacagggccgggattgtctgccctaattatcaggtccaggctacagggctgcaggacatcgtgaccttccgtgcagaaacctccccctccccctcaagccgcctcccgagcctccttcctctccaggcccccagtgcccagtgcccagtgcccagcccaggcctcggtcccagagatgccaggagccaggagatggggagggggaagtgggggctgggaaggaaccacgggcccccgcccgaggcccatgggcccctcctaggcctttgcctgagcagtccggtgtcactaccgcagagcctcgaggagaagttccccaactttcccgcctctcagcctttgaaagaaagaaaggggagggggcaggccgcgtgcagccgcgagcggtgctgggctccggctccaattccccatctcagtcgttcccaaagtcctcctgtttcatccaagcgtgtaagggtccccgtccttgactccctagtgtcctgctgcccacagtccagtcctgggaaccagcaccgatcacctcccatcgggccaatctcagtcccttcccccctacgtcggggcccacacgctcggtgcgtgcccagttgaaccaggcggctgcggaaaaaaaaaagcggggagaaagtagggcccggctactagcggttttacgggcgcacgtagctcaggcctcaagaccttgggctgggactggctgagcctggcgggaggcggggtccgagtcaccgcctgccgccgcgcccccggtttctataaattgagcccgcagcctcccgcttcgctctctgctcctcctgttcgacagtcagccgcatcttcttttgcgtcgccaggtgaagacgggcggagagaaacccgggaggctagggacggcctgaaggcggcaggggcgggcgcaggccggatgtgttcgcgccgctgcggggtgggcccgggcggcctccgcattgcaggggcgggcggaggacgtgatgcggcgcgggctgggcatggaggcctggtgggggaggggaggggaggcgtgtgtgtcggccggggccactaggcgctcactgttctctccctccgcgcagccgagccacatcgctcagacaccatggggaaggtgaaggtcggagtcaacgggtgagttcgcgggtggctggggggccctgggctgcgaccgcccccgaaccgcgtctacgagccttgcgggctccgggtctttgcagtcgtatgggggcagggtagctgttccccgcaaggagagctcaaggtcagcgctcggacctggcggagccccgcacccaggctgtggcgccctgtgcagctccgcccttgcggcgccatctgcccggagcctccttcccctagtccccagaaacaggaggtccctactcccgcccgagatcccgacccggacccctaggtgggggacgctttctttcctttcgcgctctgcggggtcacgtgtcgcagaggagcccctcccccacggcctccggcaccgcaggccccgggatgctagtgcgcagcgggtgcatccctgtccggatgctgcgcctgcggtagagcggccgccatgttgcaaccgggaaggaaatgaatgggcagccgttaggaaagcctgccggtgactaaccctgcgctcctgcctcgatgggtggagtcgcgtgtggcggggaagtcaggtggagcgaggctagctggcccgatttctcctccgggtgatgcttttcctagattattctctggtaaatcaaagaagtgggtttatggaggtcctcttgtgtcccctccccgcagaggtgtggtggctgtggcatggtgccaagccgggagaagctgagtcatgggtagttggaaaaggacatttccaccgcaaaatggcccctctggtggtggccccttcctgcagcgccggctcacctcacggccccgcccttcccctgccagcctagcgttgacccgaccccaaaggccaggctgtaaatgtcaccgggaggattgggtgtctgggcgcctcggggaacctgcccttctccccattccgtcttccggaaaccagatctcccaccgcaccctggtctgaggttaaatatagctgctgacctttctgtagctgggggcctgggctggggctctctcccatcccttctccccacacacatgcacttacctgtgctcccactcctgatttctggaaaagagctaggaaggacaggcaacttggcaaatcaaagccctgggactagggggttaaaatacagcttcccctcttcccacccgccccagtctctgtcccttttgtaggagggacttagagaaggggtgggcttgccctgtccagttaatttctgacctttactcctgccctttgagtttgatgatgctgagtgtacaagcgttttctccctaaagggtgcagctgagctaggcagcagcaagcattcctggggtggcatagtggggtggtgaataccatgtacaaagcttgtgcccagactgtgggtggcagtgccccacatggccgcttctcctggaagggcttcgtatgactgggggtgttgggcagccctggagccttcagttgcagccatgccttaagccaggccagcctggcagggaagctcaagggagataaaattcaacctcttgggccctcctgggggtaaggagatgctgcattcgccctcttaatggggaggtggcctagggctgctcacatattctggaggagcctcccctcctcatgccttcttgcctcttgtctcttagatttggtcgtattgggcgcctggtcaccagggctgcttttaactctggtaaagtggatattgttgccatcaatgaccccttcattgacctcaactacatggtgagtgctacatggtgagccccaaagctggtgtgggaggagccacctggctgatgggcagccccttcataccctcacgtattcccccaggtttacatgttccaatatgattccacccatggcaaattccatggcaccgtcaaggctgagaacgggaagcttgtcatcaatggaaatcccatcaccatcttccaggagtgagtggaagacagaatggaagaaatgtgctttggggaggcaactaggatggtgtggctcccttgggtatatggtaaccttgtgtccctcaatatggtcctgtccccatctcccccccacccccataggcgagatccctccaaaatcaagtggggcgatgctggcgctgagtacgtcgtggagtccactggcgtcttcaccaccatggagaaggctggggtgagtgcaggagggcccgcgggaggggaagctgactcagccctgcaaaggcaggacccgggttcataactgtctgcttctctgctgtaggctcatttgcaggggggagccaaaagggtcatcatctctgccccctctgctgatgcccccatgttcgtcatgggtgtgaaccatgagaagtatgacaacagcctcaagatcatcaggtgaggaaggcagggcccgtggagaagcggccagcctggcaccctatggacacgctcccctgacttgcgccccgctccctctttctttgcagcaatgcctcctgcaccaccaactgcttagcacccctggccaaggtcatccatgacaactttggtatcgtggaaggactcatggtatgagagctggggaatgggactgaggctcccacctttctcatccaagactggctcctccctgccggggctgcgtgcaaccctggggttgggggttctggggactggctttcccataatttcctttcaaggtggggagggaggtagaggggtgatgtggggagtacgctgcagggcctcactccttttgcagaccacagtccatgccatcactgccacccagaagactgtggatggcccctccgggaaactgtggcgtgatggccgcggggctctccagaacatcatccctgcctctactggcgctgccaaggctgtgggcaaggtcatccctgagctgaacgggaagctcactggcatggccttccgtgtccccactgccaacgtgtcagtggtggacctgacctgccgtctagaaaaacctgccaaatatgatgacatcaagaaggtggtgaagcaggcgtcggagggccccctcaagggcatcctgggctacactgagcaccaggtggtctcctctgacttcaacagcgacacccactcctccacctttgacgctggggctggcattgccctcaacgaccactttgtcaagctcatttcctggtatgtggctggggccagagactggctcttaaaaagtgcagggtctggcgccctctggtggctggctcagaaaaagggccctgacaactcttttcatcttctaggtatgacaacgaatttggctacagcaacagggtggtggacctcatggcccacatggcctccaaggagtaagacccctggaccaccagccccagcaagagcacaagaggaagagagagaccctcactgctggggagtccctgccacactcagtcccccaccacactgaatctcccctcctcacagttgccatgtagaccccttgaagaggggaggggcctagggagccgcaccttgtcatgtaccatcaataaagtaccctgtgctcaaccagttacttgtcctgtcttattctagggtctggggcagaggggagggaagctgggcttgtgtcaaggtgagacattcttgctggggagggacctggtatgttctcctcagactgagggtagggcctccaaacagccttgcttgcttcgagaaccatttgcttcccgctcagacgtcttgagtgctacaggaagctggcaccactacttcagagaacaaggccttttcctctcctcgctccagtcctaggctatctgctgttggccaaacatggaagaagctattctgtgggcagccccagggaggctgacaggtggaggaagtcagggctcgcactgggctctgacgctgactggttagtggagctcagcctggagctgagctgcagcgggcaattccagcttggcctccgcagctgtgaggtcttgagcacgtgctctattgctttctgtgccctcgtgtcttatctgaggacatcgtggccagcccctaaggtcttcaagcaggattcatctaggtaaaccaagtacctaaaaccatgcccaaggcggtaaggactatataatgtttaaaaatcggtaaaaatgcccacctcgcatagttttgaggaagatgaactgagatgtgtcagggtgacttatttccatcatcgtccttaggggaacttgggtaggggcaaggcgtgtagctgggacctaggtccagacccctggctctgccactgaacggctcagttgctttgggcagttactcccgggcctcactttgcacgtgtgcttacctagtggagacaaaagtacatacctcggtagagcgcgcacgcctgtaaccccagcactttgggaggccaaggtgggtgtatcacctgaggtcaggagtttgagaccagcctggccaacatggtgaaactccgtctctactaaaattacaaaaatcagccaggcttcatggcacatgcctatagtcccagctacaggcatgctgaagcaggagaatcgcttgcaccccggaggcagaggctgcagtgagctgagaccacaccactgcactccagcctaggcaacagagtatgagactccatctcaaaaaaaaaaaaagtacctacctcagagttcaaactagtgaatattaggaagtgcttgagacagtgacaccaaagtgcacaataaatactcgccagtttcattattattaaagaatccatttgaatgtcagctcaacacagcctcctataccgaggcattgtgaaccgcatctccccagcttctccaggcttttccaagaatcagggacactgtagcctgttggtctcagtgtatgacagacacggaggaagcacatctttagctgatacttaaacagagaccctgagcgcacatacacccgcgcacacatgcatggagcttcaccttctctgtcattctgcagtgaccaggagagcaagagctcccacctcccttcaaaacactgtgcccatcccgggcactaaggcctctttaaagcacggcacctccacgagggagggccacagccacatacactccacctggcaggtggacagcgtgagcacgtggaccatagcagggacaaggtgccccggccagccccaacgccctctgccgctgacagggacagaagccctctccagctgcgtgtgctgcagaggccatgcgtagcctccagctgcattctattccactccagtgcctgggccagttagcaccagtgtggaagacagtgagctggctccggacaacagggatggaggaaaggtcccacattcacattcctgatacgtggacaaggtgaggggccgcaatcgctctggcagcattttaaagatggggaagtagcagacacccacgcgtgaaggcaggagagccccaactgtggtggaaatggccccagaatggtagggccaagcctagctccagacaccccagagccctggagaagccaagactgagggagaaagcctgagggaggagcgccccagtccccagggaccggcctggtgcagagctgcagctgatgttcccctctgtgcagccccaccctctgcctcgctgagctccctgctgcgagggcctcgggtgcaagggggaggcaggtctctatctcatggagctgtcagatgagacatcgcgatcggagtcctcagcctcgcttggcggcggcggcgggtcgctaagcgggaccgcagtgaaagcaggagactttctagaaaaaaacaccagttgtcaaccttggggcaggcaggaatcctgaagacggacggcactcctcctcctgctgcctcaccctctggcagcccgtgagaagtaccggaagcgagggcggggccgcgggatggcgagggagcggcagggactgaactctctccaaacccaccctgacagggaaatgggccccgcctgtgtcttgggaactcagaggctgaggtcaggcatgatggctcacgcctgtaattccagcactttgggaggcagaggcgggtggatcacgacgtcaggagttcaaggcaagcctggccaacatggtgaaaccccatctctactaaaaatgcaaaaattagccaggtgtggtggcgggcgccttggaggctgaggcaagataatcacttgaacctgggaggcggaggttgtagtgagccaaaaaaaaaaaaaaaagaaatagctgaagtcacagtaggagagaagctgctgagcctccagcaccctgactctagggccttggctttatgtctatctgcagtatttttgtgatttttaaaaattcactttcttgttgcggtgtaacttacacagggtcaaatgcacaaatcatggccctgactttagataaaaatctgcccccacaacccttctgttccttgccagtttttaaactgcctctaaccaggggaaccaccagagctggtggccttgggaggtttcagccctcccgtcatgaatggacatagctcatccaactgccaagggagagagctgtgggtctgggccagccccaccaggtaactcccaaagggcagccccacagcaagatgtgacccagtcattgcctgagggtctctggggctgtgttccaacctttctccccgctgtgtccccctggaaggccccatgcccaggggaggcgcctaccggtctccagactgggtgatgagccggcggcaggtctccatctgcacgtccaggccgcgcttcatgctgcacatctccatgtactcgtgcaggtgccggttcatgtcgttcttggccgtggccaactccagctgtggtggggcaggcagggccatcggggttaacaggtggcgttcacagcgcctctgttgcccccgccaggaggccaacacgccaagagcagtggctgggccgggggcccaggcagccattactgaaggctcagattttaaaataaaccagaccaaggcagaaggcagcgaatacaccattgtttcctctgcttttcctggaaatctttgcctatggaggaatgcaaaggtactgctgcaggctgtgttcttttaagactgataagagtggtgaggaaagtcagtgtgggcgggatggagcagatccacaggctcccagggccacacaggttcctatggggcccggctcacccctcatcccctgtactgcgctggtcctgggctgtcccctcactgcactgtgagctcccgtaagggttagcgacaggttttcctcatcctggcagacccagacctcgaagggaattaactctctctgtgacccgtggcatacaagcctggctaactgctgaaaggggcccaatcctcttaccattctctccttatcactttattttctcacctaaaagccattttcagacactaaaaggaagactcccatattggaggtgccattgattctgagacctgtcctgatttcagaaatgtcacacgtggaaaacacggggctcagaatcaaagaaatccggtctccctccccgggcccattctgcagcccacactctgaggcaggcggagaggcagggcccaggcagcacaaactcagtgccagggacagtcgactgcctctctttgttttgggtacaaagggcaggggccgcaaggggaagcaaaatgaaacttcctggagatgacgttcgtgactgcctgagtgaagagaacggggaggataccagctgccataatgtggattggacagagagggtgggaacttagagaaagaaggaaacaggttacagggccagacagcagagatggtcaggacagtgacatttggggtgagatggcggctggctgggtgagaagccctagtggggacagcttccctggcaggcttggatccacagctggggccccacagtagtgggaggagcaggacacggtgactgttcaacccagggggaaaatacagtgccaccagcccttgttcagatcagctgcctacaccccaatttctccaccttggaagaaccggagtgcagggagctgggttctggaaccatcactcagggagactgggaagaaggaaatgaaccaaatatattctactgaaatacaaggctagtactgccaccagtagtctctgcatatgtctatgtccccacttaattcacaaatttacagcaggaacaaggtcaggaggtgaacgtgcatgtcaggagatgtccttgacaagccaccttgaaaactgcaggctcgctgtgtgaacagacttgggggtgggacgggaggagacagagagaggtgaggagcggtggggaagaactgcctcccgcccaccactctgggccttggctttaccttgctccatcttagtgaccctgagagatcaaaggtcacaaagataaaggcaccttgggtactcctgaggtcagcaagtcctcctaacggttcccctaatgcagaagtccccaaaccccaggccacggaccagtacctgtctgtggcctgttaggaaccaggccaaatagcaggaggtgagcagtgggcaagtgagtgaagcttcatctgtatttacagctgctccccatcactggcattacagcctgagctccacctcctgtcagatccgcggcggcattagattctcacaggatcctgaaccctaccttacgtgaactgtgcatgcgagggatctaggctgtgtgctccttatgagaatctaatgcctgatgatctgtcactatctcccatcacccccagatgggaccgtctagttgcggaaaacaagttcatggctcccactgattctacattatggtgagatgtataattatttcattatatattataatgtaataataatagaaataaagtgcacaggccgggtgcggtggctcatgcctgtaatcccagcactttgggaggccgaggtggtggatcacctgaggtcgggagttcgagaccagcttgaccaacatggagaaaccccatctctactaaaaatacaaaattagccaggcgtggtggcacatgcccgtaatcccagctacttgggaggctgaggcaggagaattgcttgagcccgggaggcggaggctgcagtgagccaagattgcgccattgcactccagcctgggcaacaagagcaaaactctgtctctaaaaataataataataatttttaaaaatagtaataaagtacacaataaatgtaatgtttgaatcatctcaaaatcatttcccccgggtcagtggaaaaactgtcttccacaaaccagtccctggtaccaaaaaggttggggactgctgcctaaagtcattgcactgggagagaggaggagtcagatgatttgaaaatacttttttttttttttcctgagatggaatcttgctctgtcacccaggctgtggtgcagtggcacaatctcagctcactgcagcctccacctcccagattccagcaattctcctgcctcagcctcccaagtagctgggattacaggtgcccaccacaatgcctggctactttttgtatttttagtagagacggggtttcacatgttggtggccaggctggtctcacactcctgacctcaagtgatctgcccgcgttggcctcccaaagtgctgggattacaggcgagagccaccacgcccagccaaaaatagcttaaaaggcatgattccatttaagatattattttcgttctttcagatcatgttttacactgggcacttgaggtccagggaagactagggagagatggcagcccgagatctcttctcacgaagatggccgcacaaaggcccctagttggttgaaggcacagtgaaaacacaaaccttaaatccaccatccaaaagagggagacaagaatcaggtcaggcaggaggaggaaacagtgagccgcggtagacgggagggtggggagtactggtttcccttgccatgtctttagctagcagcacaaatccaggaaacctcatctacctggccaagaaaaccaggtttgatgcaggagcaggacagtttgatgtgtgttgggagaatgagtatataggaaaataatttctcgacttccttctcaaacacctccaatgtgacagcaataagaataaagtcaaggccgggcgcggtggctcacgcctgtaatcccagcactttggaaggccgaggcgggtggatcacgaggtcaggagatcgagaccatcctggctaacatggtgaaaccccgtctctactaaaaaatacaaaaaattagccgggcgtagtggcaggcgcctgtagtcccagctactctggaggctgaggcaggagaatggcgtgaacctgggaggtggagcttgcagtgagctgagatcgcgccactgcactccagcctgggcgacacagcgagactacgtctcaaaaaaataaataaataaataaataaatgaaaagaataaagtcactctctccttatccactggtttcactttccacggcttcaggtacccaaggtgaaccttgatctgaaaatattaaatgaaatattccagaaataaacaattcctaagttttaaattgcacgctgttctgagtggcctgataaaatctcactctctctgccgggcgcggtggctcacgcctataatcccagcactttgggaggccgaggtgggcggatcatgaggtcaggagatcgagatcatcctggctaacacggtgaaaccccatctctactaaaaaatacaaaagaaattagccgggcgtgatggcgggcgcctgtagtcccagctactcaggaggctgaggcaggagaatggcgtgaacccaggaggtggagcttgcagtgagccgagttcaagccactgcactccagcctgggtgacacagcgagactccgtctcggaaaaaaaaaaaaaaacctcactctatccagaccaggacatgaaccctccctctgtcccaaggatccacactgtctatactgcctgcccattagttacttaggagccatctcagtgatgagattgactgtcgtggtatggcagtgcccgtgttcaaggaacccttatttttacttcataatggccccaaagcacaagagtagtgatgctggcaatttggatatgtgaaagagaagccaaaatatgctccctttaagtgaaaaggtaaaagttttcaacttaataagaaaaagaatccgatgctgaggttggtaagctctacagtaagaatgaatcttctatccgtgaaattgtaaagaaggaaaaagaaatttgtgccagttttgctgtcacacctcgaactgcaaaaggtaccgccacagcgcacgctaagtgcttagttaagatagaaaaggcattgaatgtgtgggtgggagacatgaacagaaacacgttccagttgacagcaactggacccaagctatcaggaggtcagtgctatctttggtttcaggcatccactgtgggtcttggaacacatgccctgaagataaggggggactacgtatgaatctcccatgtgggcctgaagagaggctgagacgcagagaaggctccatgcctctcccaaagtcagagcgtcgggaaaggaccacctcaccaggccaggagagctcacgggggtcccgtccatccctcctcccacagcaacagcaacctccattctgtggttccacaaatccttcttcctttgtttgtatttttgagacggagtcttgctctgtcgcccaggctggagtgcagtggtgcgatctcggctcactgcaagctccgcctcccgggttcacgccattctcctgcctcagcctcccgagtagctgggactacaggtgcctgccaccacggccagctaattttttttttttgtatttttcgtagagacggggtttcaccgtgttagccaggatggtctcgatctcctgacctcgtgatcttcccgcctcggcctcccaaagtgctgggattacaggcgtgagccaccgcgcccggcctccacaaatccttcttgcagctcctaaagcctagagtttgagctaaagcaccagctccacttgcctctaggtacctctagaaggtacttcaaggcttgggaaaaagcatggagatttctctgttatctcaaaggctgagtggaagaaacaggaaagtcccagtccatctctgagtgccatggcactgatagtgttaataataataaaacagtccccactatgctacactcgctatgagccagacactgccctaagctctatatatgcattatttcatctgatcttctaaacaaccctataggtgaggtattattaaattcctcattttacaaataaaaaggcccggcacagtggctcatgcctgtaatcccaacactttgtggggccgagttaggaggactgcttgaatccagaagtttgagggcagcctggaaaacatagtgacaccctgttctctgtaaaaaaaatcaaaaaattagccgggcgtggtagcacacgcctgtggtcccagctacttgggaggctgaggtaggaggattgcttggatccagaagatcacggctgcagtgggcctggagtgacagagcaagaccctgtctcaaaaaaagaaagaaagaaagaaagaaagaaaaagaaacaggtgtagggctggacacatggctcatgtctctaattctagtactttgggaggccgaggcaggaggatcacttaagcccaagagtttaagacctgcctgggaaacacagggagacaccatctctacaaaaaaatacaaataaaaattagctgggtatggtggcacacacctgtgggcccagctactcagaaggctggggtgggaggatcactccagcctaggcaacagagtgaaacagagtgagaccttgtctcaaaaaagaaaggacagaaagacaagggagagagggagggagggatagagggggaggggaagagagagagagagagaaaggaaggaaggaaggaaggaaagaaaggaaaggaaaggaaaggaaaggaggggctcagagggaacaagtaacttattacaagttcagggtggttgtaagtaacagagctgagatttgaaccgatatctgtctgtttccagagcctgaggtcttcagagcccaccaggaggactatagctgagagatcactcctcctcccaagaccttggtctctagggtcctgcagcagggatgaggccactgcgcctgcagccccactcaaaaccctctgggacaccacgcccctggcttccgctcctgcccttacctctatctggtcaatggtctcctgatactccttctcccgggttttgaacagggactccgtatctttaatcaccttctccaggctatcttcctgctgctggagtagaaagggaagcgggggaggccagccaaggagggatgggatgggacgcattccaaagggccaagtcagggagagagagagagaggaagtctggttaaagaaactggagaaagaaaagcaaaaggataaaggaagaggggagacgcaggtagaggatgacagccacatggggggacagagcaaggagaggagcgggggagtgggcttcaggctggagaggcagagccagagggccctgaggccgggagcagaggttacctctccctgggcctctgcagctgccatggcatagcctgagaaatcctcccaaagcagcagggtctcctcagtctcctcccaagtcaggctgtcacagtcgtcctcaaaatcatactccctcctagagacagggaacccgggtgtcagggcgggcggggcctcgtcctggcgggggactggggagctccggcctcctgggctgctgtggcgtcggtgctgcgggagcacggcctgcggactcacagctggttgagcatgcgctgcatctcctcgttgatgctgagggctgtgctctcctcctcatccccatcgggctggcggggcccctcactctccgacagggaggtgtcctcctcgacggcagccttgcgctcccgcttccgcccccccatggatgggaccttaatgggagacaagtgcagagactacagagacgaggccgggtgcatgaggagaaagggcgggagcgggaggccgggcagagagggtgggaatgggggagaagcatgaaccagtaggaagggggggcagacagagagaaaagtcacagttacaatgacaggaacagaaacacggacagtcaccaagggccagacacacagcgggggtcagggctgcaaaccgagaaggcagaacaagaagaaatcgagaagaagagcagtcagacaaggaaggaagggctcgctggggctgcagtcagatgtgcatgatggctcaagaggaaatttttttctaaaaaaagtctttttgattaaatgactcaactaaaaaaaaaaaagctttaggacgcaaggaggatgagtgtgcaatgtgtacaaaagagaacctgaatcacatccagatctggaaagccgggggagaagggagagaaagaaatgcagtcaagagaacaagagatagagagaaaaagggggaagagcaaggaaaagggaaagggcagaaaaaaatccgtgctcaagagcccagcgggcccaaactgagggccaggaggcctaggcagcttagaaactgggactgggacattaataagcttgcgtgagatcaaactaaccagcttcttctgtggaggaagcaagagagaagatgagaggaagagaggagaggaagcagacagaggagagagagggggaagggagagacggcgttagagacagcttccacgatgcccctcctgatgctgctccttaccccccagtctagccccgtgagggccccagttgccaggtaaggctccccaagcaggaggcagggcctgcgttccaggccagccgccacggaagcatccacctgccccacccacccctgagagcagagggcagctccgtcctcacctggaacatctggatcatgtcctcgcagttgcgctgctgagccacatcgcagagcttggcggtgatgtcgatgcggcggcagatgtccatatccaccttcatggctttctcctggatcttggtgtccagctccgacaggttctgtccagggagcccagggaacagtgaggaggcgcccagttctccagacaaggacgaattaggcctggcaaggtcctcatccttcccaccacattgcaccggtgcctcttctgtggagtctccctgagctgactgcacccctcttcctgggtagcggtggcctccccacagcactgtgtgaatatgctgggcatggggcggctcgggccactgctccctggccaaacggaagccctggagggcatggccagtgcctgggacatgcagggggctcactggaacgactagcggtcctcatcctcctagaacttacattcccagagagaaagagactcctgggaattataagagtggagaaaggactataataatcgcaacagctaacactcttccagctaacactgcatgctgggcactgtcccgagtacatgaccaccctcacaatactcctgcagagcgcacgcgtttatttccccacgccaaaggtgaggcctcagaggctgaggaatcggcccagcgccccggcgccagctgcagagcctccaccccagaagctgctcactaactgctctgcaaccccaggccctcagaagctgcgccacctctgtgacgcaacaccgagacttttgttgcttgtctttctctggagttaggggtggctaggggaaaaagggaaggaaagcaaagagaaggggaggagccgtggacgggaggccaacaggccaacactagaagggcctactcttctggcctcagaagcctcacttcgaccctcgggaagcctggggctgcactcacgttactcatgagccccttgaagaccaccagctcagccttcaactgttccaccttcagtgccagctcctcctggcaggcatcagcctcctgggcttcctgcagttgggagaaaccctgatgttggtggcactgccgaggtgggaggaagataaagatgccaaggagggacagggagacggcagcagggtcatgggcagacaggggtacccagggaagcaccagcagcaagtggggcgccaccctcacctcctggagctcatttacacggtcttgcagctggatccgcaccgtgtactcctcttcccacctgacagacatgggaagggcggagagagcttaggtacagagtccttccctgcccccatggctccctgtccccacctctctggctcaggcctcagaccccagttctggttccctggatggggaggagcagggcacaggaatgcctggccagccagctggtgaccaactgcagctgtcacgcggctctgtgcttcctgatgggcgtcgagctcgccagctgccttcccggaacctccgggctgtgcaccaggagctctgtttgggcaagtgctgaggctccggtcctccgtgatgcccatccctgctcaggccccagctcagccagctgtccggctggcctcattgcccacctcctgcccacaccagaccaccaggtccacccggcccagtctcccaccttcagtcgcacagatccgggctcccgcctcctgcccgcaccagaacagagctcgtcgagcccgctgccctgcctcttgtggtatcatttaaccctgtaaaagcatctgcaggacacatagtgtatcaacagagtgggtcaagagcctggtaggagacactcaaagtccttccccactagctccagaaactacccacccagagcctcctctaagggagtcacagagaggtgaccagactggctcagaggccggaagtcccacagcagcatgacagcagtggacacacgagcctggggttactagcactcaaacccagagggaaagagaaagtagagtatgtaaaggggcccggtgagtacggcaaatgagaactagacacagcctgttccagggcccagaattcagagattaagactgcaagtgggccggacgacaccctgggccacagggcagggtcctaggtagggcatgcttcccagagccagctttgtcatgtctcatcagccatggcaggcagtgcatattctattccatcacagagatggaagccagggcaacgtgctgcttaggacccgcccggcattccagggccctgcagtctagctggcgtagcagcacatctcaaatcctgttcctgtgagctcatcacttctgtcaacccgagaagggaggggaactgcaccaagagagaaacttcaacacaagaaaggtggttaggaaggggccaagaagacagcaagaaaattaaaatctgagtgggcagcttctgaagccttgggtgaagccctttcttccccttccctccatcttccttcctgtgtcagcctctgggtcccatctcctcattcacagccgcactgcagtattcctaataataactcctccacatcacctcgactgcccctccctgctgggcagagcaggaggaggcagccagcccagccaccaccctgctggctccccacacagcccagctcccagccttcctggctcccagcccccttccctgtgtgtcccgtaggtgcttctcccctcctccctggcattctcatgcatacagtcaggccactaagggaaccagtcgcatcagattatgttttcttagctaagacccttatcttttctgggtcttggtttcttcatctatgatgtgaaggcatgaactgtggtgccctcatgcgccgggagcccacgagtccctggagggagacagtaagcctgtcaagggcacgctaaccctggacaagatgtgtgaaagagggcaggaggggctatctgacagtgagctcaacagagcctggaagaaacttaagtaaggcagttatagctaaaggttaagcctaaggaaatcttacagggtaaaaaaaatctacaaatgaatcatctggaagcccactacagttctatttgttctttggccagacttcacacagacaggttcattttcacctccatttccatctggtctcacttataaggttcccttaacatgggcagaatttgagagcgatatccatgtgttctgcatggaccaaatatctctcttccaaaaaactgtatccctgggttgaagagagaaagcagggaccattcctatgttgggaaaatgggggctcaaaaaaaggtcacgcacaaggcaggggagctgaaaatagaacgcaggaggcctttagctacctcccagtgtagcgctcaagccatcccaggccttccaggcagaagacaggagttacagtgttgctataaagagaccagaatgagggcagggaatctagggaggaagaagagtcactgccagtatcacgcaccatccgaatccagctaaggctctctacacagcagcgtgctgcagagcgatgagctaatcagtccccaaggaataactccttcctgtcctggacagctggaccaaggacaaacgctccttcagtttaaaaaaaaaatgctcctgagaacagcagttgttcctgtggttatggatgtattccagaactgtgcctgtgccactgctgagcgcgtagttaactcctgcaggggcagagcaggctggttctgggtggcagaacgatgatttcaggacaactgaaactcccaaggacacataacatggaccacaactaaggaagccagcacgaggacaggactcaagctcagaaagcctgctgatcaggtcaggagtttgagactggcctggacaacgcaaaaagaaaaaaaaaaaatagccaggcatggacatggtagtgcacacctgtagtcccagctactcaagaggctgaggcaggatgattgcttgagcccaggaggatgaggctgcagtgagctgtgatgacgctactgcactccagcccggatgacagagcaagtccctgtctcaatattttaagtcaagggtctgtagtcatgtgttcaacgccacttcttgccatcactttgcaattattgaaatgggcatactgagctcagaaagcaaatctgatgctttcacgggagacagagccacatttgtgttctgggtgggatcactagtgcaggagaacactacatcttcttctgaaggcaaaatgcttgtaggttttgcctctttactttgcatttacttctaaaattgcacttgttcacctaccagtgtttacgaaatcctgtatttgggatgctttttctataataaaatattatcatttatgggaaaaaaaaaaaaagaaagcctgctgatctgtgatctggtaaactccagcagggtggagatccctgaaggtcgcccctagacccagcggtcatttcctagaacattcggccaatcctcacccagtgctgaatctccgccacactgggctgcataggtagttcccaggcccgcccacaaggggtcataatagctgagatgagaggggaggccgccaaaccaaagcctgtcagtcacccgctccctcctcaaggcttgggttggagtctgcaagacactacctctgctctcactcctgtcctatcggcttggttatcagccatctaaggaatccacttggtatacagccagcactcctggcatcacatccctttcccttgccccttggggccgggctcctctcagacagccaaatcttcatccacagaatgcaccgggcccgccccgcggcctcgcggtcctagggagggcccatatcccagcttctccctgctcagtcccctgctggctctccactctccctccccactggcgctttatactgccaagattcccctgtcagccctgctctccaccctcaccctagtgaattcccttcactctttcttttcccagtttgttgacctactcaagcaatggcttgaggtcccggagcttttcctatgaaaccacagcaggtacctggtttccatcaatattctttgggaaaccttggggtgtgaaagaatcactcgttgcaaggtacagcccctccctcaccagccccttccagtttcactcaatttagtctcccaaatttacgctatatccttgcctcctacttttgaagtttatatccctaacctgccccagggctgagaccggtagggcagagccccagtccctttcacaccgcacaaaacccgcagttaagcctggatggcagagacaagccggaaaagtaggaatccccccgtgttccgctcccagcgtccttcttcctgtcacgagcagggcttctgcattctctgcggattctagtctccctgcatccaattgcttccaagctcctcattacacagcacaaactttactctcattcttttcacccctgattcttcggaacccacaccaactcgcggcccgttgtgagtggtatgacacagagagacctgtccccctttcccaatccctacctccgcttgtactcgtcccgctcccgcttcactttggccagcacgttgtagagagcgcggatctcgggcgtgatggtgtcgatctggacgcccaccccatccgggtgcacccacgacaagccaggcccttgcaccagagtgggctccagtcccggcccgagccggcgggcgtgcgagaacgaccagatggtgccgggcatgaagcgggccgacgaggaataggtggtggaggtggaggtggaggacgacgagaggctggccgcggagggcgcgagggggccggccggggagcgcgcgggcgagcccagcacgcgcgccgaagggctgcagacagcggccggccgggcgcccagctgcagccccaggggccggatggggctgacgaagccggtctgcactgcctggtcgcgacgacccaggccccgccggccctgcttaccctcctccagcgcttgctgcagttgcttctccaacagccggttccggcgctccagctcatgcaccttggccaggaagcagcggaaccggaggttcagggtcttgagcacgttgatgttggagcccaggtcattgcggagggccatggcggcaggcggggccgggcccggcccgggcggcgagtaggcagcagggccggccggcgagagaggcgccgggggcaagtctcctcccccggcgaagtggtcgcctcccagtgagtcccccagtggcccggccaggccctgctgctcctgctgcaggaggaagaggttggggccgaataacggattcatggctgcgccttctgctgggagatgcagaccggtgcaggagcagggatggaaggcgagccagaagagccaatgcggcgccggcgggacagagccgaccaatcaggcggctcggcagcggggcagaggtcagggggcgggccgaggggaagccaatgacaggctccaattggaggccggaccctggacctttccgggtctgaggccgagccctgtgatgaggggagccaccgcctggactccagccggggtggcgtaaagcccaggacctccagtaccccatgggttctggtggcaagcccatctcccctacacgactttttttttttttgagaccgagtctcactgtcgcccgggctggagtgcagtggcgcgatcttggctcactgcaacctcagcctcccaggttcaagcgattctcctgcttcagtctcccgagtagctgggattacaggcacccgccaccacacccggctgattttttgtatttttagtagagacgaggtttcgccatgttagccaggctggtctcgaacacctgacctcaggtgatccacccgccttggcctcccagaaagtgctgggattacaggcatgagctagtgtgccccgccttcccctacacttctattgccctcctctccccggagttcaatcacccctagctctgactccagggctttcccttcctgggaaaacccaaggatgcaggagcctaaaactgaccttatttctcagtagcacccaaccattccctctcctcagaagatcccagtcccacctcccatctttacccttaaagcggcaaaggcagcacccagttccctcaaaaatactcagtggccagaggttttaaaatgtgtattaaatttcatgggtatgcacagtagagaaggcatcctcacagaggcaagagttccaacctggtgacaatggcagtgagccacccgtctagttttcaaccatctaagatagcagcagctggctgttgcccctggactgagatttcttcctctttgctggtggggggcggctggaacggatgggagacacagtgggaggctgaggccccttgggggtatcattctgtttctggaaggcagctttctcaaaaggctgctctggcaactgctgcttctcaacccccttggcccttccaaggggctgatgatggtccttaggtttcagggtggcctgagtcttggatggggataacacagccggtgtttgtgtgtctgtgcccttgggaggggcattctgcctgaggaaagcaactttcttggaggactgtaatttaggtgatcgttgctttagcttcccagtcacctttggctccctgatcccttcggcttttccagctggctgactgctatcctggaagctggaggaagcttgggtctttgtgacagaaggtacagtggacaattctgagtctgcccctttggagatgccattcagcttctggaaggaggccttcttgggatgttgctgtttctgcagctgctgctttgtctttgcagcccccttggctttcttggctggctggctgctgttctcagacttggggatgacctgaggcaagtctacatttgtaggtgtggctgtttcagaatttcctggggttaaaattaaacagatggtgtcagaaaatgggccttatcaccatattttaatattctcatattaaaatatgagaattgccatttcctgggcaggagctccacacaattaggtcagtgcctaagagcagattacctaaattcccattacttaatataacttggcctttactcaagtcctagttgaaccttgtattaaaagatcactgcctataggccaggcgtggtggctcacacctgtaattccagcactttgggaggccaaggcaagtggattgcttgaggccaggagttcaagaccagcctagcccacatggtgaaaccatctctactaaaaatacaaaaattagccagggatggtggtacacacctgtaatcctagctacttgggagtctgaggcacaagaatcgcttgaacctggaaggtggaggttgcaatgagctgagattgcaccactgcagtccagcctgagcgacaaagcaagacaccgtctcaaaaaaaaaaaaaaaaaaaaaaaaatcactgcctatccttgggccaaaaggtttctacaggaagctgcgccctcttgaggacaggaagtaacaagatgctgtaaggaagaggtgattctcagggttttggggttttttttttctttttttgagatggaatctcactctgtcacccaggctggagtgcagtggtgtgatctcggctcactgcaacctctgcctcctgggttcaagcaattctcctgcctcagcctccggacaatcacaaccgtgcgccaccatgtccggctaatttttgtatttttagtagagatgaggtttcaccatgttgaccagctggtcttgaactcctgacctcaggtgatccacctgcctcagccacccaaagtgctggggttacaggcgcgagccaccacgcccggcctcgcagggtcttctaaatgaatttgaagcactaggctttatttatctttttttttttttttttgaggtagagtctcactgtgttgcccaggctggagtacagtggtgccatcatagctcactgcaacctcaaactcctggggctcaagggatcctcctacctcagcctccagagtagctggaactactgtctccctttgttgcccagacaggtctcaaactcgtggtcttaagcaatcttcccacctcagcctcccaaagtactgggatttataggcatgagccatcaccacacctggcctatttattttttaaatcagagaagtttctttccatgtgaattgtgatgaagtgcgggataattaaaatatgtactttttaagttatagcaaattttactattccttttttttgagatggagttttgctcgttgcccaggctgaaatgcaatagcgtgatctcggcttactgcaacctccacctcccaggttcaagtgattctcctgcctcagcctcctgagtagttgggactacaggcacgtaccaccacacctagctaatttttttttttggagacggagtctcactctgtcgcccaggctggagtgcagtggcacaatctcagctcactgcaagctccgcctcccgggttcatgccattctcctgcctcagcctcccgagtagctgggactacaggcgcccaccaccaagctcagctaattttttatatttttagtagagatgggggtttcactgtgttagccaggatggtctcgatctcctgacctcgtgatccacccgtcttggcctcccaaagtgctgggattacaggcgtgagccaccgtgcctggccacacccagctaattcttatatttttagtagagacagggtttcaccgtgtcgaattcctgacctcaggtgagtgctgggattacaggcatgagccaccacgcccagacaaattctactatttctaaagtagcacttctctccctcttccaactaaacccagggttatatcccagtaagcagtgctctcaaggctgtttcagaaaaccccacccttcccttgagatccaggccagactcctcaagatggctgagaaaacaatctgcaatgagtgtgaagggctcagagaactgctgacaaagctctgtggagctctgttccaacccagtgctgagattgctggaccagcagaggtccagtaccagtaagtccaccctgtgccaagaaggaaaagaaaccacaacctgcatttggaatgcatttagtgctgaacaactgcagccacttggcagaataaaggaacaggcctccatccatatgaacactttagcctgttcacatggggtccagcactcaaaagcaattctagctggaatgagagggttctctcagccaagcatgcaaaggctggagtaagggatgcatgaatctttcctttcccttcctcttgtcacaccataaagcctcctgaaaggtggaaagagcaaaggtggtgacgaagggaagaaaaagattacttacctgtctgggactgagggatagaattggaaaatttcttgaacttggcaatgaagaacccatccatattgtgggtatgagggtagaagcgtcgggtagaacgcagactggggtggaagcgcctttctcgaaagcgggtaaaaccttcctggccaaagtctaggcccgtgggcaccagtcgcacattcctctttttcagagcatagtctaccacccactcattctcttctacctggatgtggggggaagacaaagaacggaggaaaaagcagagctggagctgaagggagctctaaggggcaaagagccccccagcccagcctcccctgctctgccatggcagaggtctcactgtgatagaacaggtgcagtaaaccaggtagcctcctgtcttggaggtcgcattgacagagtcaatagcactcaggagcaactccttctggaggtgagcacagcgcaggatgtccttctcatcctgtcccaaaaagagacccaaaggcagcctcaggaggagaggggagcccagagggtgtccccatctcagtttccagctctacgagacccagccaaggcctctcaggggcccaccacctgactcctcaccttgttagtcttcacggctggatccttggagatgaccccagtgccactgcagggagcatccagcagtactcggtcaaagccccccaccacctggagaaaagatacagatgaatcatatgtctcttctgcaaccagcagggcaatatttactagggtcgagtctaaacattgaggtcaggaagggagaaggtcaaccggaagaagcctcagaagacacacagctcgagtctcaccttggggaactggcgcccatcatagtggctgataatggtgttggtgactcccagccgatgcaagttgcccacaacactcttgagccgctcagcattggcgtcattggcaaggatcacacccgtgttcttcatcagctgggctaaagagagggcagtaacagtgctgatcagccagttccactgtctccacacttgctcccaccctcctgtccaggaatccacatgagaagtgtcatcacctcaaggcaacttcgctcccaacaagcctgcctactgtataggctgatccactctgcactagcccctggtgatcggcaagtctaccgatgtggttttcccatttttaccaaacacctatgtggtcctacatactaaattacttcttttaagtgacagcagcttaataaaagttatggctgctgactatgtgctgaacactgccaaggacttctaaacgcatcattttaaccctcacaatccaagcgtaatacaagggccaacccaagcacaattaccatcccattttatggatgacaaaagagaatccatagtcagatgggtagtaagtggcacactggaacccaggccgactccagaaactggtcctcaccaccctgctagctacctgcacattgtgttccatgagcactagtgagtcagcaaccccagcaaccccatctactttcaaaagcaagacagcccgatgaatcccacctgcctgcccctctcatacccatgtagctggtctttcctccaggggcacaacacatgtccaggatccgctcatgttcctggggtgccaaggccatgacgggcaacatgctggaggctccctgcagcatgtagtgcccagccaggtactcgggggtagcacctgtggagaaggaccaccctgtgacatgcggtagggacagggacagaggtagaagggctcttgggtgggggagacttaccaatgggcacagaagaatcatacaccactagtccagtctttgaccacttgcccaggggatccaggttaaccccacgattgattagagcctgaaaagggatgaagattttttttttttttttttgagatggagtctcactctgttgcccaggctagagtgaggtggcgcaatctcggctcacagcaacctccacctcccagattcaagcgattctctcgtgcctcagcctcctgagtagctgggacaacgggcatgtaccaccatgcctggctaatttttgtatttttcataggatggggtttcaccatgttggccaggctggtctctaactcctgacctcaggtgatctgcccgcctcggcctcccaaagtgctgggattacaggcgttgagtcaccgcgcccggtagggatgaagattttaataacctcataggctactctacccagaagacagatgaagacattaaacacatgcttcataaaaacatggcccataccccacaactcctatagtgcttactccaaacacagtcatcatggagtcattgagcagtttctctctcccactccatcctatggtgcccttttttcttaacctcaggctcctaactcaagatctgaacttcatcccaatggagcaggatgccacctcctgttactttatttcctagaagtggcatctgattttctaagaggctgagcccctccactatactaaaaatttaatgacattggttataccacattacattattaggttttcttcacaccaggaaatatacaacacatataacccaacaactgactttacaacaggggtctttaacctggggcccctgaacccttggaaatgagtttaaaatattgactgtgcatatgtgtcttttttgtgcagtcaggaatcatatttccccagctcctcaatgatctccctccaatttccttgggggcagcacgctcatcctgaagtctcatcatcctagtcacagggagcagagtatgaacttcccattccacagaggtcctaggcccccagatcctatcctgccagagacatcaggcctctgggtttgcccccccaggatcatgcttaggtcctaaggccccacccagtcagggtagcacagaggaatctctggagttggcagaagtcacttcccttctgagatgagtgagcctcaaaggccacccctcacctgtgcaaggtctcggcgtcgggttttcaaggtattggtccggagggtgacgggccgaggcacctcattagcttctaagaactccaccagctgcggggcaagacagcagggaataagtgaggctggctaaggagctcagtcagaagaggggagcaagggggccgaacatcttccttacacagcgtaaggaggcgagaaaagaaaagcaaaagaggcattctggcaatccagtacctcagacagagggaagaggtccatgagcttgccaagcaggaagtctccataggagtagtaaatggccagatccttcttgagccggttcaggtattcagaacgagaccgcccttcctcccgctgagccccaaaatcacgcagaattcccacaatatcctggatccgcttgtgaactcgttgcaggtctggagcctgggcatgtgggcctgttaaggaactgtgtcatgatgtcctaaggcctggaaatccctctcccaaccaccttcctcctaactcttcactctgccctgcaaggatatcctgctccatctccccagcagggggcagcacaaatggttcctcatccacattgatctgcaggcccccatctgcctcttccacctttggggggcctgactcaggggtcacttctttctcttcctcctcgtcctcggtctcctcttcactccactggatcctagaaacaggtccaggaacagagtgattcacagaccaaaacagatacctcctccttcctcacagcttccccaccccagtggcttcctatgctccatcccaatagcttccaaaactcacccagcagcagcttcccgggccttctgcttccgagcagctctttcaatgggcagcaactgaagagagacaagggctattaatacaggcctgcccttccatcagcccttgtagcagttctatctctatatcttattttttcgctaaataaaaatccaacacttgctctcagaaggaaatagaggagcaaagaaatgaaaataagatgggcgcagcattgctcactgttgaaactaagtaatgagggcatggtggcacacacctgtaaatcccagctacttgggaagctgaggcaggagaattgcttgaacccgggaggtggaggttgcagtgagccaagaccgagccactgcactccagcctgggcaacagagaaagacttcatctcaaaaaaaaaaaaaaaaaacctaagtaataaattaaagggttcattacatttttctttctactattatgtttttcacttttccattaagaaaaaaaaaaaacttgaaaaatacctggatgtataaagaaggacaaaaatggcccttgactaccattctgccatattttttttgagagaagtctcgctcttgtcccccaggctggagtgcaatggcgcgtcttggctcactgcaacctccgcctcccaggttcaaatgattctcctgcctcagcctcccaagtagctgggattataggcgcgcaccaccatgcccagctaattttttgtatttttagcagagatggggtttcaccatgatggccaagctggttttgaactcctgacctcaggtgatccgcccacctcggcctcccaaagtgctgggattacaggtgtgagccaccgtgcctggcccattttgtcgttttttttttttttttacttactctgtatttttcacataatccattttcaagtttgtttcttgctttttagacttcagttacatcacaggcattttcatagacataatgaccagtgtaactgcatcatatgcatgaaccataacttacttaagcatattgtgtattttggaagtttcctgagtttttggcattatgatccacatggtgcctgcaaacctaataatgaccctgtagatacaaggggatgtaggaagggggtgcacatggggaccttctctttttattctatacgattctaataatacatccacacactaattgtataataacttcctgcacctcagtaaagaactatttgctgacattttggatcatcttccttaatagggaattactatgtcaaaaggaagcagttattttttttttttttttttgagacagtctcactctgtcacccaagctggagtgcagtggtaagatcacagctcactgcagcctcaacctcccaagctccagtcatcttcccgcttcagcatcctgagaagctgggactacaggcgtacgccaccacacccagctaatttttaaaccattttttaacttaactttttttttttttgagacagagtctcactttgttgcccaggctggagtgcaatggcatgatctcggctcactgccatctccgcctcacaggttcaagcaattttcctgcctcagcctcccaggtagctgggattacaggcatataccaccacaccagctaattttcatatttttagtagggatggggtttcgccatattgtccaggctggtctcgaactccggagctcaggtgatccgcccaccttggcctcccaaagtgctaggattataggcatgagccactgtgccaggccaattttttaattttttgtagatacgggatctccctatgttgcccaagctggtctccaattcctgggctcaagcaatcctcctgcctcagcctcccaaagtgctgggattacagatgtgaggcaccatacccagccaaaaggaacaaatttttcaaagttctgagataactgctttataaaaagtgcatttctgtgcccatcagtggagcacaccattgtccaccttcccatacctacaccaagacagccttctagatttttttaaatgctctatcctacagctctttcaaacttgtagtgcactgggaggatataaggcagtagggaaacagtgatggagcacaaaaacccctttcctctagtcaggcttatccttgccactaagaaacagtctcaagaatctgggaaagaaactaaatagcaaggatccttctatgaatgcccaaaaagatgaatctcaccgcttcaccttcctcctcatcctcagagttggagtcagctccatagtcatctaccgtatcagcatcgtcctcggagccccagaggtccccgtggttcaccataccatcttcttcagagtcttcctcctcctcttcctcatcactgccaggtgctgggcgcttcttgcctcgaggagcattaaatagggactggggtcccttcttaccagctgtctggacagctcctgcagagatccctaagggtttgaagagtcctggactaatggcagccacacattccctggccccacaccctgggagcctgtactttctacccctcagaatgtcctttggctgttcctttcactccggaaatgtttagcgagttcttccctacccaggacccaaagggactcctcatgtagcatccagctcttagtttcacggaccttttggtagctttccaggcaatggtttggcctcaggagacttatttgtcttaggggcttcaacagagcccaatctcctcttggctgccctgaaaagacacaagagattcaaggagtgaagaaatgggaagatacttccaggctctgccatttccaccatagggaaatgtgagagtctagaattaactctgtggtcaaagatgagcagtaccaatttaacctacttaagttttgacacccacacttacctctttcgagcacgactagacagcctcttggaattttcgtcacttactgtttaaaaaagaaaaacgaggcagaacaagttacaggggacattaaaaataaatgggaacggaaataaacatggtaagagaattagtacactaattaaaaggagtccatttaaatctcagccctgttattatttaataactgtatacaagtttcttttttttttttgaaatggagtttcactcttgtcttccaggctggagtgcaatggcgtgatctcaactcactgcaacctccttctcccagattcaagcgattctattgcctcagcctcccatcaccacacccagctaattgttgtatttttagtaaagacagggtttcaccatgttggccaggctggtctcgaacactggacctcaggtgatccacctgcctcggcctcccaaagtgtttccttaatagtgcctctctcacaggactctaagatgattaagcgatataacatgaccaacaagtttaatacagtgcccaggacttcctactatctcaataaactgcatcctttatccaatgcccaacacaaactcccggtccagtgttacctcccaccagtcttccacacagtatactactactcggcatgaagcagccagatccgtgcttttccatttccaccccttccaaaaggcaaatcagtgactgacccctccccttcactacttcctcttgctacaatgttacccatttttcaaaacccagcttaacaaaaacttttacagttctgcatgggctcccccttcctctgaactcacaattgttttaaatcacacttttcccttgcatgaataatagttgtgtccgtgtcttcacatctctacgacctaaacagttccctacaatctaaacggctgtttcattcatacctcctagtaactcatacagagaagattccacttaaatataaaatgaacagaaactaaaaaagagaagaggttataatacagaatactgcaaaagctgagggatcaggaggccacaactaatccttacctgcaggcaagaatctgacgagttctgtctcggcacccttctgcttccgggcctttcggcctggcccccgcttctccttcgtagggtccaacttgcgccccatggtactgtggcaggcagaaatgggagaaggtggcgtcgcgcgtgtcggagggaacggcagaacgcacgcttggcgtattatagtgggaaagggcacagcctcaactcagcacccgcaactcactcagcactcccgactcagcacccgcgactcaagcacccccgctatccccctggaggcccgaccgaacgccctcccacctgaaacccaggtagcgcacccttctccccacgtcccagaccaggtcagtgctgccactcttcgtcccccaatttcctctagacccaccagaatgcgggttaatgtccgagagtgcccttcgggcggccctccacgtgcaatccggacctagctttcggccggcactcgccacagaatcgttccacgcaggcgcacgggtagcgctagcctcgcggccccgcctcttcctgttgcgcctagtcggccgccgcacccggaacttacgctcgccctgggaacgccagcggagccggcggcggcgagtagggggcaattcgaaggagacgcgcagcttacacccgcggcgggtggagggagcaatgtgacgaaaccattgagcttgaccgaccttccctcatggagttggcttttagcctcacggccggtttctgttgggtgaaagccgcaccttctcctcgaaccagggcccgacattggagccctctccctcgcatccactgccctagtccagcgtcaagatcacggaattccaggctgggcgcagtggctcacgcctgtaatcccagcactttgggaggctgaggtgggtggatcacttgaggtcaggagttcgagaccagcctggccaatatggtgaaaccctgcttctactaaaaatacaaaattagccgggcgtggtggcgggcgcctataatcccagctactcgagaggctgaggcagaattgcttgagcccgggaggcggaggttgcagtaagccgagatcgtgccacttaagcctcaccaagagcgaaactccacctcaaaaaaaaaaaacaaaaaaaccagccgggctcggtggctcacgcctgtaatcccagcactttgggaggtcgaggcgggcggatcacgaggtcaagaaatccgagaccatcttggccaaccttgtctctattaaaaatacaaaaattagttgggcatggtggctggcgcacgcgtgtagtcccagctactcgggaggctgaggcaggagaatcgcttgaacccgggagggggaggttgcagtgagctgagatcgcgccactgtactccagcctggcaacaaagcgagactccatctcaaaacaaacaaacaaaaaaaaccgtggaattccatgccacttacctcctcctctttgccccttttttaaaaatctttttatagagacgggttgtagggggtggcgtctcactatattgccagggctggtctagaactcctgggcttaagcgatcctcctgcccccacctttgtgctgagattacaggctgtgagccaccgtgccccgccctcccagcaccttccttgatgctgacccctgctcagcccctcaattaaggtgctgcactgcacctcattcgcagggggcctcttcgccggaactcgctttcaggtgggtctacaattagttgggaaacaacgggttgcaaggctgacctggtctgggacatgagaaggggtgaactacaagggtttcaaggttggaggacgttaggtcgggcctccgggggtgtgggattgaggctgtgttcttccacaaattgcatcccaattttgcacaacttagcaagaaaacccccctcagccttcctagaaactaacattaaggtagtggttaggtgttaaaaccgttccatgtacttcactggtttaacttgacaaccgtatgaggtatacatgagatatctgcatcccaccaaagttaaacaacttgctcaaggtcacagagccattaagcggcggtgcccgcagttttgcagcctctcattttccacaggtggaagtcaacgttggcaaggcacatactgcacccacacacagaacccagttactcagtggggtatcaggacaccacgtagcccttaattttcaactatacaggtgccaggctcctgccgcacacactcatccacctgcacctacacccacactgaaccagagcactaaaatacaaggaaacttttattttcaattttcatcaagaaatttgctgtggttttttatgcttttggttttttcctttttttttttttccactttatttcatttagccgctcagtggctagagccgctgggttcctggtattaaaaagatgccaacagaggtagctgtgtctcgcccaggggcccagcccactctgaataccccccaaaaaggagaaaagaaaacacaaaataaaccaacaaaataaaaccaaaaggaggaaaaaattcagatcattttcttcaagcctggcaggaacccacaacagtttgtgtgtaacaggcgttacagtggggagaagccagggtccagaaggccagcccgccagctcctgcagatggcgccagcgctactgctgcatgtctcttctgcaggaagggcaccactgcccctcactccctcccctcccccagtgcactggggctgttcctttacaacatggaagatgggcagaaggaaggtgagggtctctcaggcccccaggggagaagctgggacaagagaaagtgaggaaggtcactgctcagcggtggaggtggtatcagtctgcatcttcactgctgctgggctacctagagaaggagacccgaggagtcagaattccagatgataggaatccacccaatctcaagggaattcactgataggccacccacccagtatgtaaagctagggacatacagcaaagttacaagctccagaatggttctgcaggaagaggtggtgtcaagaagaaaatggtcctacctgctgtggggtaggttcgggtgcccggtttgccaggcggctgagaatgttacgctctgacatctgtaacctcacagcaactgggggaattcgggcaatggtagctgggagtcgagtcacatcagctttcatgtcactcagcagttcttccagctgtttcagaactgcatagggagaaaaagaggtggtgagctgtggtggcccagactgagctccctctaccctagtggaccagccccccatcacttctcagtgaccaagtaactgtgatgtattgtcttctgtcatctgacctgacctccaccatgttcaaattcctactcctcatattccagttccaactgtccatgattttgtgctttttaaagtcacctaaaccttcactatcccttactattattgtatttcctcttcttgagcttattcgttttttctcttctctaccttcagaatctgtctccccacctccattataacagcattcttttccttatttcaccctccgcctcctcataaccttttactttaattagaaacaaaatgttgaaaggggtctagaatttgaagggatcttttatcacctgaagttacctctaaagtatcgcaaatgacactgtattattctgctttgctttccatctcaagaacctgaatatgtttaaagttaaaagaggtggccgggtgcagtggctcacacctgtaatcccagcactttgggaggccaaggcaggcgggtcacctgaggtcgggagtacaagactaggctaaccaacatggagaaaccccatctctactaaaaatacaaaattagctggggcgcagtggctcatgcctataatcccagcactttgggaggcagaggcggtggatcacctgagatcaggagttcaagaccagcctggccaacatggtgaaaccccatctctactaaaaatacaaaaaattagctgggcatggtggcaggcgcctgtaatcccagcaacttgggaagctgaggcaggagaatcgcttgaacccgggaggcggagattgtggtgaactgagatcgcgccattgctctccagcctgggcaacaagagcaaaactccatctcaaaaaacaaacaaaaaaacccaaaattagccgggcatgcctgtagtcccagctactcaggaggctgaggcaggagaatcacctgaacacaggaggcggaggttgcagtgagccgagatcacgccattgcaccccagcctgggcaacaagagcaaaattccacctccaaaaaaaaaaggtggccagggcggagcacagtggctcacacctataatcccagcactttgggaggcggaggcgggtggatcacttgaagtcagtttgagaccagccttgccaacatggtgaaactccatctctactaaaaatacaaaaattagccacaagtggtggcgcatgcctgtagtcccagctactcgggaggctgaggcaggagaattgcttgaacccaggaggcagaggttgtggtgggccaagatcacaccactgcactccagcctgggcaacagagctagactctatctcagaaaaaaaaaaaaaaaagaggtggccaggtacagtggcacatatttgtagtcccagctactcaggaggctgaggccggaggatcacttgaatccaggagttcaagacccacctgggcaaaatggtgagagcccatctcttttttttctggagtctcactatgttgcccaggctgatagcctgtgcaatggcacaatcttggctcactgcaaactccgcctcccgggttccaagcgattctcctgcctcagcctcctgagtagctaggattataagcgtgcgttgcgccacatgcccagctaatttttctatttttagtagagacggggtttcaccatgttggccaggctggtctcgaactcctgacctcgtgatccacctgccttggcctcccaaagtgctgggattagaggcgtgagccaccgcgcccggccaggagtccatctctttaaaaaaaaaaaaaggcaaagaactactgtccttgattgcctctaagatactaacctcccaaggatggcaaagatccctagcacctcctaaactcccagacaaaggagctctgaaagtttgaaaacaaatatatgtacattaggatgcagtcagatcagggaggccgaatcggcaggaggcaggggagccactggctacctttgtgcaggactgcattggctggcttgtttcctgccattgactccttggacaggtgctgatgactttccgccaaacactccacctcagcaaagcgggtgttgagggccatggaagggtgagaagggtcttctgacatgttcaagtaagcagcccggcgcagctgttcctcaatcaccagagcttgttctaagagctggacaagggataagaggaaacgggagttcgactgataactcactttactcacttctgactggcctctcagctcacctctcattgtttcagatggtaataagaacctatgaagaacttcatggacagctcattcccacacccaagtagtttaactttgccttgtaacttttttctttccctttttcaatgtcctcatttttaaaactctttaccctttaggttctcttatacaaaagcgataaaaactcaatttagaaaatagaatatcaaaaatttttaacaacagataatcccaccttctagaaatacatcctgatatttttctttttaggtttttttgtgcatagttttttacataactgagatcatactatatacatacccatattatgttttcatttagttacacagttaagcatcttcctttttatcatctactctttatcaactactcttcaaaaacatgttttggctgggcacggtggctcacacctgtaatcccagcactttgggaggctgaggcgggcagattacttgaggtcaggagttcaagaccagcctggccaacatgacaaaaccccgtctctactaaaaacacaaaaattagccaggtatggtagtgcgcacctgtaactgcagctactcaagaggttgaggcagaagaatgcttgaacccgggaggcaaaggttgcagtgagccaggatcgcgccactacactccagcctgagtgacagagggaaactgtctcaaaaaaaaaggggttattttgctatttaaaaatatttttgttttttatttcctcttatcgccatctcactcccattcctctgaaaagcaacttttctaatgtagtaatactgtggctttttgtgtaggtttttaaaaactgtttctgtttcctatgtatgtttctaagttacagaatgatgttttctgtatctataaaatgctttttcttctcccactacataccttttaaaaggtactcttatgttgtatgcacatgaattttgttgcttctgttgtttaatgccccatgatatgaatacatgtttcacctatgcattctcctaatgctgaacatttatgttgcctctaggcccccaccaccaaaaatcatactgcaaaaacactcatgcacatgtcatctgatggagctgtattaaagattctttgaaatatatcccaagaggcagaatgttggttcttaatttatgaaaagattttaattacttaaaaaatatattcataaaacatatgactcaacataagagaagatttctcatacccttctcctctcctagtgtcagccagcagttctatgcagatgatttgatgcttctcaaacatgtaccttcagcactggttctgatcccactagtgtatggtgatgggggtcggtagtgggaggggtgctgatttgtgagaaataccaaaagacttgtctaaaattcgatatcattcttttctacaaactgctccctctcttcttaaatgacaatttaactttctcagtgactcaggctcaaaatgttattttcagtctcactcattctgtacctcaaatccagtaagtcaggagttggcaagctacagcctgtgggccagatctgccccaccacctgtttttatatggctcaagagctaagaatgggttttacattttaaaatggttggcaaaaagtcaaaacaagactatttcatgccacttcatgagaattatacaaaattcaaattgtaatatccatagatgaaacgctgaaacacatcctaacttattcatttatgtatcccctgtggctgctttcacacaacaaagatggagttgagtatatgcaacagagactacatgtcccacaaagggactatctggccctttaatagaaaaggtgtggttgggtgcagtggctcacacttgtaatcccagcactttgggaggacaaggcgggcagatcacctgaggtccagaatttgagaccagcctggccaatatggcaaaaccccatctctactaaaaatacaaaaattagtcaggcatggtggtacatgcctgtaatcccacctacttaggaggctgaggcaggagaatcggttgaagccaggaggcagagggtgcagtgagccaggaaatgtcgccactgcactccagcctgggcaactgagtaagactttgtctcaaaaaaaaaaaaaaaaaaagggttttattaaccgtttttggtttggggggagaaaaaaaggtttgctgacccctacagtaagtcactaagtccaataaattctttggtgttgtttcctttatctttacccttttcattttccacaaccagcatcacagcccagacccttaacacctcatgattatatgacagttttataatcttatgaatgctgtttccatttcccttggtcctatcaaaactctgctcacaaactttcagtggctgcccattaacgatagcgtaaagtccaaactctcttatctggtgccaagaacccacctactgacctctagcccgtccacctttctcgttccaacctacctcccaccatcacccaacacaaatgtttccctacagctcaactgggctatctgctatttccagacatactaagctttgctggctcacatctttgcccaacctaatccctttgttcagatacccttctgtttctaccaaaaaaatctccgtcgcattcttcaaaacttcattccaatgccatcttctccataaagccatttgtgagttccgtccctactccaattccctctcgagaacttttttttttttttaagacagggtcttggatgggcacagtggctcacgcctgttatctcagcactttgggagtccgaggcgggcagaacatgaggtcaagagatcgagaccatcctggccaacatgctgaaaccctgtctctactaaaaatacaaaaattagctgggcgtggtggcacacgcctgttgtcccagctactcgggaggctgaggcaggaaaatcgcttgaacccgggaggcagaggttgcagtgagcagagatcttgccactgcactccagcctggcaacacatcaagacactgtctcaggaaaaaacaaaacaaaacagggtctcactccaatgcctaggctggagtgcaatggcacaatctaggctcattgcagcctcctaagtagctggaactacaggtgcacgccaccagaactggctaatttttgtattttttgtagacatggggttttgccatgttgcccgagctagtcttgaactcctggactcaagcaatcagctcttttaaatgctgagattagccactgtgtctgcctctctgagaactttcttttcttgtcttttttgaggtgagtctcgctctgtcgccagactggagtgcagtggtgcgatctcggctcactgcaacctccgcctcccgggttcaagctattctggagaactttcttatgccaatcagcaatctctctcctgatatgcagaatggcattcatttgattacacatgtgctcctacttgaaactgaaagctccttgaaaacagataccatgctttgtctttttatccctgggcacatcattgcttagtacataatacctgaaggcttattagtgtaccatttcttccccgattatactcagcgtacgagacaacagacacgtctttttttttttttgagacagagtctcactctgttgcacaggctggagtgccgtagcacgatctcagctcactgaaatctctacctcccgacttcaagcgattctcctgcatcagcctcccaaagtgctgggattacaggcgtgagccaccgcacctggcccacacaggcactttttagcccagaaaaaagaaccaggccaggcatggtggctcatgcctataatcccagcaatctgggtggccaaggcaggtggatcacttcgaggtcaggagtttgagaccagcctagccaacatggtgaaaccccatctctactaaaaatccaaaaaaaacagctgggtgtggtggcaggcgcctgtaatctcagctactcaggaggctgaggcgggagaatcacttaaacccaggacacagaggttgtagtgagcagaggctgcatcactgcattccagcctgggcgacagagattctgcctcaaaaaaaaaaaaaaaaaaaaaacaaccagcagcccactgactaatagctctacatcttcagagatgcaattcaatcccacctctatatctttcctgaatactccaatctgcagtgttccccaaacaaacccctctgcactagtgtgtcactgattggacacatagtcacctacagctcatgtacagttagttaactttcaattctgtgtgtcttcaaccctaatgtgtaagttacttgggagcaaagccttccatagaatgaagaaagtgagaacagtgcgctggatggacagactccctctgctgcaggacgttacgcactttcaagtttgtcacttaagcaatatattcctccccaaccgctcaccttaaaccttcgagctagaaatttattcttgatctctaagaaattgccacggttcatttcacccttgaaaggctcattgaggatggcatagcgtgggtcattctggatgtcttgccaccgggcatagccatggctattggaaaagtgctcaggaaaaacaaaacaaggaaagtaagaacctcaaactaaaagaccttcagaacctttcaccaaaagcctcagtacagattcaggcaaaggatactttataatgccggctagcagccagtagtcatgccgtcgatgccagatctcataagtcttcttggtaactgtggctgcccgctcttcattctgccaaagggagtgcaactctgaggaggaatttagggaaggttgggggtggggggaagcaaacatctgtgagaattgaaaaagctacttattcttgtcccccaccatcccctacccctggatccatttcatataatttgcttctggctttctccacagaacccactatcagtttggcattccctcatcaaacagaggtaaagaggtaaagtccctgtaccgtggtttctgacaagaaccccaatttcacatcagatccttctaaccctggtgggcccctcatttccataccagtaaaaccaccatctgcaatgttaaacatgaaacgttgtttaatatttttcttctgtttctcatcattcaggtccttgggggtctctccattctgaagcatcacctcttttttctcttcttcttctttcttctcttctacagaatatggggaagaaaaatgtcagctccagccaaagcccagcaccatcgcccttacccagaacactgtatgctacaagaatccatccacctacaccccttctccacctgggtgtctctcagacccagaaaatggtgccattggcccactgacaactaaatgtggggacaggtacagtcttttatcttgggataaaatggctagatgagtatggacagggaggcagggcagatacagtccttgcttctggttttagagttcttctgaaccacaatcaacttctccaaacacccacctttgtcttctaccacaataggggtcagatctattgctgacttttcctccaccttctctacatcagcagcacctaggggaagaaatgttattgagactatacctaaaggaagaacattctcctctgttgcacactattatccaattggatagacccacatctaaatgtctgcaattacagtaatgtcagctgggcatggtggctcatgcctgtaatcccagcatcttgggagacagcagcaggcagatcacttgaggtcaggagttcaagaccagcctggccaacaaggtgaaccccaatctctattaaaaatacaaaaattagctgggtgcggtggctcatgcctgtaatcccagcacttggggaggccaaggtgggtggatcacctgaggtgaggagttagaaaccagcctggccaacatggtgaaaccctgtctctactaaaagtacaaaaattagccaggcgtggtggctcacacctgtaatcccagcactatgggaggccgagatgggtggatctcttgaggtcaggagttcatgaccagcctggccaacatggtgaaaccccatctctactaaaatacaaaaattagccgggcgtggtggcgcatgcctgtaatcccagctactcaggaggctgaggcaggagaattgtttgaacccaggaggtggaggttgcagtgagccaagatcacaccactgcactgcacatcagcctgggcgacggagcaagactccatctcaaaaaaaaaaaaaacaacaacaaaaaaaacaattagccaggcatggtggctactcagcagactgaggcaggagaatcacttgaacccaggaggcggaggttgcagtgagccaagatcgtgccactgcactccagcctgggtgacagagtaagactccgtctcaaaaaaaaaaaaaaaaaaaattttggccaggcgtggtggctcacgcctgtaatccccgcactttgggaggccaaagcgggcggatcacgaggtcaggaggtggagaccatcctagctaacacggtgaaaccccgtctctactaaaaatacaaaaaattagccgggcatggtggcaggcgcctgtagtcccagctactcaggaggctgaggcaggagaatggtgtgaacccgggaggcggagtttgcagtgagccgagatggcgccactgcactcaagcctgggcgacaaagcgagactccgtctcaaaaaaaaaaaaaaaaaaaaaattacgtgggcatggttgtggcacgcctgcaatcccagctactcagaggctgaggcaggagaatcgcttgaacccaggaggcgggagttgcagtgagcagagatcgtgccactgcactcctgcctgggtgacagagtgagactccatctcgaaaacaacaacaacaacaacaacaacaacaaataaagtcataagagataccttaagttaggggaaaacctgccacctaaaatcaagggtgcaggattcttcagtgtgtcgcttcctcctgatatctctacagccccagcaaaaattcacgagtgaccatggttcacacagggatctgtagtgcttaatatggataccggccaggcatggtagctcacgcctgtaatcccagcaccttgagaggccaaggcaggtggatcacctgaggttaggagttggagactggcctgaccaatatggagaaaccccctctctactaaaaaatacaaaattagctgagcatggtggtacatgcctgtaatcccagctactcaggaggctgaggcaggagaatcgcttgaactcaggaggcggaggttgcagtaagccgagatcgcaccattgcactccagcctgggcaacgagtaaaactcctttgaaaaaaaaaaaaaaaaaaaaaaagccaggcacagtggctcatgcctgtaatcccagcaatctgggaggcaaaagcaggtggatcatgaggtcaggagatttagaccagcctggccaacatggtgaaaccctgtctctactaaaaatacaaaaattagctgggcatgatggcgtctgtctgtaatcccagctcctcgggagggtgaggcaggagaatcgctcgaacctgggaggtggaggttgcagtaagccaagatcgcgccacagcactccagcctggcggcagcactacactgtctcaaaacaaacaaacaaacaaaaaaaatgtggatacctttacctttgggctctgtctccataggttcctctgttctctccttcacctctgccttttccactttctcctctccctcagggggttcaacaacgaccttttcatcctctgaggcaggggcaggggcctgtgtacacttcaaaggaaaaaaaaacaaaaacaaaacagatgaagcagacaggccagcaactaaaaggaagactggacttacacatttgtctttagtatggcattcagtcaccccatctcttacctcaatggcagtctcaggggctgtagatttaacctccttttctccttctatgctctcttcttctttgaggctattttcctctatttttatcccatcttctgcagaacaataaaagacaatcaattaggaagaaggtactagatcagagagaaggtcatttcttcccagtttgtctcatcttaaattgtcctctcgtgcctttaagagccagccctattcttaggacggccctcctaaactgagagggaattgctgtgtgtcctgccagactaccctgttagaactgagcacaggggagcagaaaaataggccaggacaaaaagagagggacagaaaatgataggacaggcagacttaccagcaggtgggacaggtgcaggagtgttgggctgcgtgtcccctggagtggagggtgtaggagtttttggggagggtgaccctggctgggacatcttcttgttttcctccacctcagccagttcaggcatgctccagcgcccattaacatgttcaaactcctgaacctgtagcaatgggacaagaagttgaagacccaattccagctacaggctcctttcctattggccttccagtctccgcctcccgggttcaagcaattctcctgcctcagccttctgagtagctgggaatacaggtgcccgccaccacgtgcagctaatttttgtatttttagtagagatggggtttcgccatgttgaccaggctagtctctaactcctgacctcaagtgatccacccgcctcagcctcccaaagtgctgggattacaggtgtgagccactgcgcctggccccctagaaacaatggcaagaggctcagggctcaccttcttgcgaatcaaagacataacaccaattctagtaaggacatgctggcgagacaggccttctcgggggacaccatcagcaaaggtctcagccccatctgcccccggctcacataaatgccgcatgaaaagagagacatatgccctgtgtaaagaagtagagaaagagttaaatagggatcatgctgactcttagattcttttccatcccttcgtgaggcattatcacaggcaataactatggctccaccttgaggtaaagcccaccactgcacgggaaggctgatctctagaccccacaagaagacccaggttctcttccagggaagctaggaacacattactaacagcttcacctgccaacttcaacagagaaaatagcccacttccctgcacggctaggcctagaaccatggaatgaccagatagatagcagaagcccttgctctagatcagtccactccagccctcaactcacttgaactctttctctgatttgcctcgcaggtctcttacaagccactgggtagtaaaagcatcctgaggtggcataccatatcgcataattgcattaagaaaggcttttcgctgacgagcattaaaaccaagtacctaggggaagaagaaacccaggtgagaggcagcaggtcgcattccaccaaagatgcaatatctgacactcacccctccttagaatcgtatggcacttacttcaatattcccaccaacacgggccaacagaggaggcaatggcttatctttatcattccgcaggcccttacgactgggcctacggggagctgcaagaagaaaaagatgaatgagtgacacaggtaggatattaaacaaagcaacatttagaaaagcaacaaaaaaagcacagccctcaccttctgaacgttcatcaaagtcttcatcaccttcctctgaagccactgagtaatcggactggttgtcggactggtcgtcctgccaatctggagggagagagggcagatgagcggggcccactgctctagtggaacggcccatgggtggggggcggggccggccacacacacctcggtcctcctgggagccatcattgtagttgacctgtttacggattctttttcctttgcccagatttcgggctagatcttcttgctgctgctcataatggtgccgcagcaatttctcccagtagtcaggatccacactttcttcctgtttaatgatttcccgttctacctcctcttcctcctgggacagagggagggccaggactcaggagtgctgaagtcagcaccaccagctacccctggtcctcacagttcccactctgctagctccttttcatgactggactcttaaatacttggtgtgcctgtttggacctaagaacttagaagaaatttgattgagagtacacagctcctcataattacatatagattagcagtcagcataactcaagaaaaacatgggatagagctattatcacaggtaaggatgaagagacagaatgctttcttctaaccccttgcactgatgcatatacaattgaaagatagcaaaaagaaaagaggtcagagccttagcaaggcagaatggagaaacttctgaagtactgtaaaagattttcataagagagaaggaaggagaggatgactataagcctttctattcttcataaacttcataaaagcttaccaactgtctgcagaacgaaaagaattctatatagcctcttatgtcccaaaaacgttgatactcctctaaaagtgaatttttttcagacacttgaggaccactcactgattccacatcccttatattggaattaaacagctgctaatagcataacattagaaacaacctaaaagcccatcattatggaactaattaaataaattacaatcggccctctgtatccacgggttccgcacctgtggattcaaacaaccatagatggaaaatattcagagaaaaaacaaaattatgtctgtactcaacatttacagacttttttcttgtcattattccctaaccaatgtagcatttacattgcattggtattacttttatgtttacaaggaaaaaaaagtctttgggtacatatatgtgagtgtacatatatgtgtatgaatatatgtataatttgtatacacataaaatatttttggaaagatataaaaggaactgaaaacattagttgtccccaagaagggaactaaattgttagaggacaggagagaaaagagatacgtgtgtgtacatataaatatatatatatttttttgagagagggtctagctgtgttgcccaggctggagtagagtggcgtcattacggctcactgcagcctcgactgccaagtttaagcaatcctcccacgcagctgggaccacaagcgtgagcaaccacactcggctaatgtttttattatttagagacggaattttaccatgttgcccaagttggtctccaactcctgggctcaaacgaccctcctgcctcagcctcccaaagtactgggattctaggcatgagccaccgtgtctggcccttttgtgtattttgaactatgtaaattctatctattaaaaataaaacttaaaaatattttaaaagaagtcaacagcagctatagtcactaatcaaagaacaatttgtatacttatgtagtcaccagcaaggatgatccacttagcatgtgctctcccatcaatcacttctattacattcactgccactgaaaggaatgtgagcattctatcaatagggtcgtttctgattgaacactacggtacacagacctatgtcagaccattcagccacacttacatataaactgaggttggacgcattaccttcgagaacaaaatcacaggtaagcatcagggaaacacagcaagggggatggttctgaggtggaagaatgagaaaagatgacaaagaccaccagaaccaatgccaactgaaagaacccggagctgagtggtttacagaggacaagaaaaaggaaattttatttttccatttcatacccctctatatcatttaggagagaaaaacattaaaacaagccacacacacattcctcacatactattttttttactataaaagaccaagaaaaagaagggaggagaataaaaaggtatataccgattctaatctttttgagacggagtctggctctgtcccccaggctggagtgcagtggggcaatcttggctcactgcaagctctgcctcccaggtacaagtgattctctgcctcagcctcccgaatagctgggactacaggcgcccgccaccacgcccagctaatttttgtatttttagtagagacggggtttcatcgtgttagccaggatgggctcgatctcttgacctcgtgatccacccgccttggcctcccaaagtgctgggattacaggcgtgagccaccacgtctggcccaattctaatctttaaaaaaacatggtgaaaccccatctctactaaaaatacaaaaaattagctgggtgtggtggcacgtgcctgtagtcccagctattcgggaggctgaggcaagagaactgcttgaacccgggaggcggaggttgcagcgagccgagatcatgccactgcactccagcctgggcgggaaagcaagactctgtctcaaaaaaaaaaaaacacgcacacaaagaggccaggcgtaatggctcatgcctgtaatcccaccactttgggaggccgaggcaggcggatcacttgaggtcaggagttctagagtatcctggccagcatggtgaaaccccgtttctactaaagctataaaaaaattagccgggcatggtggtgcatacctgtaatctcagctacttgggaggctgaggcaggagaattgcttgaacccaggaagtggaggttgcagtaggctgtgatcgcaccactgaactccagcctgggcaacagagcaagactccgtatcaaaaaaaaaatatataaggccaggggcagtggctcacgcctgtaatcccagcactttgggaggcagaggtgggtggatcacaaggtcaggagatcgagaccatcctggctaacacagtgaaaccccatctctactaaaaatacaaaaaaaattagctgggtgtggaggcaggcacctgtagtccccagctactcgggaggctgaggcagaagaatggcatgaacccgggaggcagagcttgcagtgagccaagatcgcaccactgcactccagcctgggggagagagtgagattccatctcaaaataaataaataaatacatacatacatacatacacaaggaggcctggtgtggtggctaacacctgtaattccagcactttgggaggtcaaggcaggagaactgcttaaggccaggagttcaagaccatcctgggcaacatagcaagacatctctaaaaacatttaaaaaattaaccaggtgtggtagcacacatctactagggtcactcttcagcccaagagtttaaggttgcactcagctatgattgtgccactgcactctagcctgggtgacagagcaagaccctgtctctttttttgttgtttttttttttcaaacacagtctggctctgtcatcaggctggaatgcagtggcgcaatctcagctcattgcaacctccgcctcctgggttcaagcaattctcctgcctcagcctcccgaacacctgggactacaggtgtgcttcatcgtgcctggctaatttttttatttttagtagaaacggggtttcaccgtgttggccgggctggtctcaaactcctggcctcaagtgatctgcctgcctcggcctcccaaagtgctgggattacagatgtgagccactgcacctggtagagaccctgtctcttaaataaaaaccagaaaacacaaagagatagattacctaggatcttctgccttttctctagagagatgaggtagcattcaaaatttcatttgtaaggtttaataaaacacataggagaaaatgacattctggtaaagagccaaaataactgttgtgagcatgatatttggttgtaagttttctgacaaccaaggcaaagatgaaaatctgattagtcatgttatcagctttgttttcaaaggaagaggatcaattcatcaacataagaatttgcctacagatattttccacttgtctcaaataccaccttggtctcaatgccaattttcagaccaattaccaagcacaggattgccttggattcatactcacccccatttcttcttcccgtaccacatactgggccactttgaatgagctcaaatattcattcatgccctgcaattctgtgtcttcagtctcatcctggttacggtctagcagccgttcaatggccttatcatcgtagtggataacactgctatcttctccctctttgttgtctcctcctataaaaaatcaagggcccacatccccaaagtcagtttcagcagctgcagtggaaaaagcaagtcccacaagacccttggtatcaaagattctccctaacctttagagaggccaagccccacaccaaaacgtaagttcctgactacctcacctccatcagtggcttcatccttgaatagttcctcagtgccaaatttgaggatatcatcaagctcctgtttggacatagatccagtcttggagcccagcccaggccgcaccactagatgcgtcagcatcattttcttctttgccacctgcgtgatgcgctcctccactgacgcacgggtcacaaaccggtagatcattacctttttattttgcccaatccggtgagctctgctaaaggcctggagttgaacaggaaataaagccagaaattgtattttcctggtgccactcttatcctgacttccacataatattctaaattcagtacaaggcaaggtccacagcctacattcataggaaacttccttttgcacccctgcctccagacaccaccctctattatcatgttacccaaaataggatcacagctaaccaaactctggcttacaataaggtaaacaacacaaaaagaatctgttgtttctcacttaaaaacctaattccagatggtggagccctcatagaggccactatgcctttctagcataacatgttacttattaaggctgcctgctgcctctgctcacctgaatgtcattatgggggttccagtcagagtcatagataataactgtgtcagcagtggccagattgattccaaggcccccagctcgagtggaaagcaagaagcagaactgctgagcacccggtgctaataaaagaaccaaaaacaccattagaagtgtctcctaaattccaattcataaatgtagtttaaaaaattaagccgggggcagtggctcatgcctgtaatctcagcactttgggaggcagagacaggtggatcatttgacatcaggagttcgagaccagcctggccaacacggtgaaaccctgtctctactaaaaatacaaaaattagccaggcgtggtggtatacacctgtaatcccagctactcaggagactgaggcaggagaaccgcttgaacctggtaggcagaggttgcagtgagcagagattgcaccactgcactttagcctgggcaacagagcaagaaactccatctcaaaaaaaaaaaaaaatttagctgggaatggtggcacacgcctgtagtcccagctactcaggaagctgaggcaggagaatcacttgagcccaagagttcaaggttataatgagctctgactgtgctactgcactccagcctgggcaacagagcaagaccctaactcttatagaaaaatgtcagaataggccaggtgcagtgactcacacctgtaaccccaacactttgcgaggctgaggtgggcagatcacctgtggtcaggagttcgagactaagctggccaacgtggtgaaaccctgcctactaaaaatacaaaattagccaggtgtggtggcaggcacctgtaatcccagctactcgggaggctgaggcaagagaatagcttgaacccgggaggcagaagtaaaaaagaaagaatgtcagaatataaaacctcattaggcaaacaccacagtaataatcattgtaatcaaggtccactgacgaatactaatatcggtgtgaaagtttaaggagaaacaggacactgacatagtctcaaatatctccctcaagctatttatcaatcacaatgggaacaatagaaactttacactgcagaaactcagcaggcaccaccttaaccagtgatcaagtcattaccagtaaggggacatatgaacatcatgtccgtcccccagtatgatgaactgaaaaggacacatcatcgactgggcgtggtggctcacgcctgtaatcccagcactttgggaagctgaggcgggtggttcacaaggtcaggagatcgagaccatcctggccaacatggtgaaaccctgtctctactaacagtacaaaaattagccgggcgtggtggcgggtgcctgtaatcccagctactcgggaggctgaggcagcagaatggcttgaacccgggaggcagaggttgcagtcagccaaaatcaggccactgcactccagcctggtgacagagcaagactttgtctcaaaaaaaaaaaaaagaaaaggacacatcatcacctctgtggcattcttgcccagaatgtctaatctaatcaagagaaaacatcacacaaacccaaacttaagagacattctacaaaataactgaacagtgcttatcaaaagtatctatattgaccaggcacagtggctcacacctgtaatcccagcactttgggaggccaaggcgggcggatcacctgaggtcaggagttcgagaccagcctggccaacatggtgaaaccctgtctctactaaaaatacaaaaatctgggcccgtggtggcacacacccgtaatctcagctactcaggaggctgagacaggagtattgcttgaacccaggaggcataggttgcaatgagtcaagatcgcgccactgcactccaatctgggcaacagagtgagactccatcccgaagaagaaaaaaaatctgtatcatataagaaaataaagaaatgtcacagatagcaggaagcacaataactaaatggaacacgggacctgggattggatcctgaaacagaaaacagacatcaagaaaaattggtgacattcattgaagttctgtcatttatagtacaataccaatgttaattttctagttttgatcattgtactgcagttacgtaagttattattaagagaagctagctagttgaacagtatacatgaactctctctgctgttttgcaacttttttctaagtctaaaattaaaataaaaagttttttttttttaaacaaggagtagtgatactgagcacagtggcttatgcctataatctcaatactttgggaggccaaggcaggaggattgcttgagcccagaactttgtgatcagcctgggcaacatggcaagaccccatctctacaaaaaaatttttttagttagctaggtacagtggatcaagcctacagccccagctagttgggaggctgaagcagcaggatcacttgagcctgggggtgtgtccaggctgtagtaagccatgattgtgccactgctctccagcctcggcaacagagtgagaccctatctcgaataaacaaaacaaaacaggctgggcgtggtggctcgtgcctgtaatcccagcactttgggaggccgaggtgggcggatcatgaggtcaggagatcgagaccatcttggccaacatggtgaaaccacatctctactaaaaatacaaaaattagctgggcgtggtggcacacgcctgttgtcccagctacttgggaggctgaggcaggagaactgcttgaacccgggaggcggaggttgcagtgagccaagatcgtgccgctgcactccagcctgggcgacagagcaagactccatctcaaaaaaaaaaaaaaaaaaaaaaaaaaaaacctagtagcgtctactgaggcagacaagtctgctagtaacttgctatttgagcttgaacaagtcctgaccctttgcttgccctcgagatacaatgctttcttctttctagcagaaagaacaaataccccaaaagaaaaaatctcctaggaatagtccaatacattcgtccaattgagacattcaaaagctttactccatctcaaatgacaaagtcccaaaagaactacacagaaaaggagatgcacaagaagttacagtccaaagatataagcaaatgaggattcctgaaactaaacaactccttctctctcaccattgaagcggtcaatggcctcttgccgcatgttcccagtgattccaccatcgatgcgttcgtatttataaccttcatgttccaagaaatcctctagcaggtctagcatcttggtcatctgcaaaagaagcacggtttaattatggaagagtcagatggtaatccctttccttaggtcactaagggttgtctatgactgttccctaaagctcccagtccacatgatacctgggaaaagatgagtacacgatgcccaccctccttaaggttcttgagcattttctgcagcagcaataatttcccagatgctctgattagggcactgccatcatacatgccattaggcatcttaggagcttcctgagaacaaatgcaaagaaaaaagtattaaaagaaagcccacatggagaagacccaacccagggaggaacaggagatggcactacataccattgcagccacagggaagaggtatggatggttgcagcacttcttaagatccatcaccacattcagcagagacacctggttgccaccacctcgggcattgagtgcttcaaaatttcgagtgaggatgtacttgtagtatttcctacatgggcaaggtagaaagacaggttagacttgagagcctttcaatgactaataatgcagtgccaacaactgagatctttcttccaacacatcccactttggaactaaggacacctaacgcacaagcactaccaccaccaccattttaaataaggaaaggtataacctaaaataagtaagaactatgcgctccagcgccctagcatcaggtttcttcaggccttgcttgctcctgtcaccagatgccttgaagctgagtgggggaggaataggaaacactctgcagactggcagatgtctaaatggagtctgcttctgtccctcccaactcacttctgcatagggctcagctccacacgcacaattagttctgtcttggagggcatgttcttgaacacatcggctttgagccgccgcaacatgtgcggccccagcatgtcatgcagtttttttatctggtcctccttggcaatgtcagcaaactcctccaaaaaaccttccaaattgcttcagaaagaaaaaggaaaaaagttattggagaaggagaaaggaagaaagaaaagtgatacaggaaatgggcaacaggaagaatgagaggcacaattatgagccgattacagataaacacatacttactggaacctctcgggggtgagaaagttgagcagatgaaacaactcttccagattgttttgtaatggtgtcccagtcagcaacagcttgtgctggagtgagtaaccattcaatacccggaagaactggtgaagcagatggagaaaggtgaaatccaatgaaaacagagctctagcaaatctctacaaaatttcaagtttttcactgcccaatagttaagcatcccactcctcacattctttttaaaggcctggccaccaagggctgtcacatacaaggaaggaaggcagagacaattttcccctctcctctccatctacaagttttccccttaatgaattggtagtactagaaaaaacccaaagtgggggctccaacatccctccctcagccctcaccttagactgattgttcttcagccgatgggcttcatccacgatgaggcaggcccaatcaatagagcccaaaatagccatgtcaatggtgatcaattcataggatgtcagcagcacatggaatttcacagatgcctctttctgcacatgaaggcaacttggtcactactagtcagttcctctgtgtaagcacaaccaggagactgatggaatgttttcctcctcccagggttacccttttgcctcaccagggaccagatcacaaggaggtaaactaagccagaagccacaactctttctctagggtggcttccctcccctgagataccttcatgcgggaggccttcttgccaccacgaatggcattgtcttcaaaggagaactcattctctcggatgatggcacggctgtccttgtcacccacataggttacgacatacatgtctggagcccacatttcaaactcccgctcccagttgatgatggtagaaagaggggcgctcactaggaaggggcctttggaatgaccctttgagaaaaaagaggagagtcaggactgagggccccagcacactgcaaccccagcgaacacccaccaccctgctgccccctcaagctgagccaaggactgacacacctgcgctgctgctcctgctctcaccttcctctatacaagtgcccagcccactcctttccaaaaacccaaggtcccaccataactacaagtcttacctctcccattaagtctttatatactttttttctgagacggagtttcactcttgttgcccaggctggagtgcaatggcgcaatctcagctcactgcaacctccacctcccgggttcaagcgattctcctgcctcagcctcccaagtagctgggattacaggcgtgcaccaccacatccggctaattttgtatttttagtagagacggggtttcgccatgttggtcaggctggtctcgaactcctgacctcaggtgatccaccaacctcgggcttccaaagtgctgggattacaggtatgagccactgcgtccagccaagcctttccatactaattctactcataattctacttccctcaacacacaatcattcccctagaactgatactctatggatccactgctaatcctacccagggctccatgccctcaaatcttccgctgtgtacatgtgtttatccactatcacatttatctactatctactaaacacatgtgtacatgtgtttatctattatccacagtgttcttgaaggtcagagaccaatttttttattcccttatctctctactcagtgtaagttaaggcttcaaacacaaaacacccacacaaaaaactatccaccccagatttccttacctccttgtaaagggaatacaggaagactgctgtctgtacagttttcccaaggcccatctcatcagccaagatggtgtcagtgccctgagcccaggagaagcgcaaccaattcaggccctccatttgataggggtgcagggttccacctgtagcatccaggtactctggctgtcgctcatacttcactgttggctgaaggatgaaacagagaagtcaagagctggcaaggaactcccctcctcccctaatagagcagctgcttcctcctcactagtcttcacggatcctcttggggaagagctccggaaaattcggagggaagagatcccctatgattactgcaatttcatgttcagtttagggtcctccaggaaacagggcttaaccagacctgattttgatcctacagatcactgaggaaaagcacgtcacagactccctaccaatacaataattctactagtcaggatccaccaggtaaataatcgttatgtccctcttagattcatctttttaactttaatcaccctcaaattacactgtacaaacaaaacccagaggaactgagcctgaattaagccagattcctatgtaagtgcataaaagctaggctatgtggcccctccccccagacaacacttcttcaatcattcaaaatatacctcctttttttttttctgatgacaaaagaagaaagtaatcctagtgctttctgatatatagagatgtggagaagtggggaagccgactttgtgaagtaatctcagctacaaagttactatctgcatttcattacttaagagtaccatcattagactgcagcaaagatacattgtcctacccaacaaactacagtcccttccacccccactcacatcaactgttggcgtttctggaggcctctccaacttccgaagcttcaccttcttgagcttcttgcctggtcggccttcctcacccctcattaactccctaaagaagaaagacatcacacagctgcccaaaatccttttctatagaagaaacaacttggccaggcacagtggctcacacctgtaatcccagcattttgggaggccagcactttgggaggctgagacgggcggatcacctgaggtcaggagatcgagaccagcctggtcaacatggtgaaaccccgtctctactaaaaatacaaaaattagctgggcatggtggcagacgcctgtaatctcagctactcgggagactgaggcaggagaattgcttgaacccaggaggcggaggctgcagcgagccaagatcgcaccattgcactccagcctgggggacaagagcaagacttcgtctcaaaaaaaaaaaaaaaaaaaatcagctaggtgtggtggcgtatgcaaataatcccagctactcaggaggctaaggcaggagaatcgtttgaaccaggaagtcggaggttgcagtgagtcaagatcacgccactgcactacagcttggtgacagagcaagactccatctcaaaaaaaaaaaaaaagaaacaactctatgcctcacccaaaatcactcacctgtgattccaatagctctgcttgaacaggtcgtaatcctggatctccacatcctcactctcccaagaagcctgatcgtaaggtaagtcccgccacttgatcaagtagtggacgtggcccttcttgtccacactgcaagtccaggagagaaaaccctcagagccagaaaaggcaaccctcctcacttcctctcaaaaactggcaataccgtttgtttcacaccagacctctaggtatgccacagatcacacgttttcagagcctctactgtaccagtctctgaccaaaaattatctctaatttatactttcctagagctcaaacaccagaattcagtcagttaataattaacatagagtgttggccgggtgcagtggctcacgcctgtaatcccagcactttgggaagctgaggcaggcagatcgcttgaggccaggagctcaagaccagccaggccaacatggcgaaacccgtctctactaaaaaaaaaaaaaaaaattagccaggcatcaggccgggcgcggtggctcacgcctataatcccagcactttgggaggccaaggcaggcggatcacctgaggtcgggagttcaagaccagtctggccagcatggagaaaccccgtctctactaaaaatgcaaaaattagccgggcatggtggcaggtgcctgtaatcccagctactcgggaagctgaagcaggagaattgcttgaacccgggcggcggaggttgcagcaagctgagattgcgccactgcactccagcctgggcgacagaacgagactccatttcaaaaaaaaaaattaggcaggcgtggtggcacacgcctgtaatcccagctactctggaggctgaggcagagaatcacttgagcctgagaggcggaggttgcagtgagcttagatcataccactgcactccaggctgggccacagagcaagactctgtctcaaaaaatataataaataaataaataaataggccgagtgcggcggctcacgcctgtaatcccagcactttggaaggaggaggtgagcggatcacaaggtcaggcgatcaagaccatcctggctaacacagtgaaatcccgtctctactaaaaatacaaaaaaaaaaaaattagccaggcatggtggcgatggcctgtagtcccagctactcgggaggctgaggcaggaaaatggcgtgaacccaggaggcagagcttgcagtgagccaagatcacgccactgcactccagcctgggtgacaagtctgtctcaaaaaaaaacaataataataaaataaataaataaagataataacatgaagtgtcaggcgcagtagctcacgcctgtaatcctaacactttgggaagctgaagcagacagattgcttgagcccaggagtttgggacagctatgagcagtgatcacgacactgcactcaagcctgggcaacacagctaaaatttgtctcaaaataaatatataaggctgagcgtggtggctcacgcctgttaatcctagcacttagggaggccaaggcaggcagatcacctgaggtcaggagttcaagaccagcctggccagcagaatgaaaaccctgtctctactaaaaatacaaaaaattagctgggcatggtggcttgcgcctgtagtcccagcttctcaggaggctgaggcaggataatcacttgaatctgggaggcagaggttgcagtgagccgagatcacgccactgcactccagcctgggcacagagtgagactctgtctcaaaaacaaaaaacaaacaaaaaaaaccagtgtcttccaagtctaagttactggtgacagccattttcccaatctctttagcaggactctcccacggagactgcccgtctcccgtgtgctcagctggtacctgtggttgaggattcggtggatcatcatccactcgggttttatcccatagcgatagaagcgttcctccatctctgcaaatttagggtccttgttctttcgctttcggcttttctcttcatcaccaccaaagtccccagaaggtggctcatccatatcattcttccgctgatagtttcggaacatcacctgacagtgcagctccagctttgagcggaaagagaaaatcagccaccaagaagctgtgttcattccttctatccacaaggctcttttgtcactatcctcttcatcgtagcccctacatctccagactatcctaaacttacctgcagttcagaaacccaggagcagtgccagtaagacatgccttgccatttcacaaagaactgccgctctggccgcccctccaagggctttggggagggcgtgttgggatcagcatctggaggccgaggcactggtgtgggagatggtggctgaccccacttccagattaggatcttctgcactttgcccttcagagctggacactgagagaaaaagagacaacttaatctcaaatcataaccatgggaggagaagggacagcccacagtctcaacttcatcaaaggacgattcagatctcatttcagacctggagcagtggctcatgcctgaaatcccagcaccttgggaggccgaggcgggcagatcacgaggtcaagagatcgagaccatcctagctaacatggtgaaaccccgtctctactaaaaatacaaaaattagctgggcgtggtggcatgcgcctgtagtcccagctacttgggagtctgaggcaggagaatcacttgaacctgggaggcagagcttgcagtgagccaagattgccccactgcactccagcctgggggacagagcaagactccatctcaaaaaaataaaaaaagatctcatttcaaataaaatctaatcccaggactcctccagggagaaaatacaggttgaggacccctcatgtgaaatgcttgggaccagaagtattttggatttcacatttttggattagggtgctcaacctgtaatagaattccctctccatttctggacatcgtccaggatttgcgtgccaccatcactcctatctgcttaacagagccagtagttagactttaacaataagccagaacaatcaggaaatcaacagacttagagcacagaattcctcccttaagcaatctaaagcagtaagtggccctattaaacattctaaactggctggcatggtggtaaacacctgtaatgccagcacttaatgaggacaagggagcagaatggtttcagaccaggaattcaagaccagcctgggcaacatagtgagaccctgtctcaacagagattttttttttttaattagctggatgtggtggcatgcaccagtactcctagctactcagcaagaggttgagataggaggatcacttgagcccaagagttggaggctgcaatgagctatgactgcaccactgcactctagcccggatgacagaatgagaccctgtctccaaaaaaaaaaatttttttaacaaaaaaattgaaaacattgtaagctaccaagaccctgaggcagggtgtcaacacagggacaaatgttctcagctagaagaacattgcttcatctcctcttaagagagctggcaaaacatcaactcctcagtttgaagttagtcctatattttcccaggacaaaagtatcccaacactataggatgaaggagaatacctttctcagggctgaaaagctcatagttcctctcctgcaccccagcctcacaatagcctacatagaaaagactacactttcccattttttgccccggctgagatcagtcactcaccgtacaacggggacagagccattcaccgttggggatctctggaagtgggggattcaggcagtggatgtggtaggaagaaggacaggtatcacagcagagcagttccccaccatccttgcagacccgacagaattccatatggtggtcatcctcctcttcgaggtctcccccaacctcttccaggatctcctcaccctccgaattgtcctctttagcttcccactggatgccttccttctcctgcagtaaaggaccacagattcagattattacccccacccgcccaccgcagtctgaagccagtgcccatcattcctttgaatgcttcccaaagctcacaacccgcagcaccagcatttccatttccatccaggccccgaagagctttactgtcccacccttcttctcatgggttccaaggggccacaatggccagacactcacgcagtgtgggcagctccacttgccctcgggagccttctccatgtcgggatccaggcagaccatgtggtaagcacggggacaggtatcacacaggatgatctcaccgccttgctggcacacctcgcaatagtcctggtggtctgtctcataaccatccacagcagtcacctcctcctcgcctgggcaaggaagagggaaagcccagttattggaaaaaaactacctccccccaccccccgacccctatctccttagggagattcttccccaatcactcccacctcatcccatcacaaatatacagaagagaaacacacctttctttttctttttagtggttcggagtttcttgcggctgcggctactacggctggtggaaccatcagaaacagaatagctattgatactggcatcatcgaagtcagattccacatctaagtcatcatcctcactctggcaggatgaaaaagaataaggttagacgttcaagccaaggggaaggacagagtggcagagaggggagtactctctcactggggacaccagaatcccagcaagcaccgttatacagggagcctagtctcatcttgttctgtgggaaacgccccacattcttacgtgcctactatgaaggacaggttctgatagaaggtcacatcctttctattagacatggcaccctccctaaagcgatgggctgggctctcaccgaggatctcttacgcttggaaccaaaacctcccagcttgattttcaggggagctactttcttgggtttaggcttcttggcatcaggtacacgagggctgcccttgggcttcctccgagcattgggacctaaaatcaggatatatccaaatatataccacaagaccaaagatggggaaaataaaatcttctccacctaagcttgcttccccacattcagattcccaaatttccctccaaaatccaagactcattcctccctcctatctcctaccttagggctgacagaccagcattcccatgctgtctttgacatcttaagcccacactagacacccccactcccatttgaaccccatttcacctttgccctccttggtcttggccttgcggataggcacctccacagggggaggtggtggtgcaacctcagtggctgtcaccatgctctccaccacagctaccgctgctgctgccgcagctgccactgatgccccagaactgcctttgaaggggttattggtactgaactcccgccattttgcacccaaaaccatcatcatcttggagacagcaatcttgggatttttggcagcaatgaggggtctggtggagaaatgcacaagagcagagggaaaggtttaagaataaaaaaagaaagagaagtaagaagagagaacagaaagattctcctcccccttccccaaaccccttctgttttacctgacaaactggctgaaggccttgtagttggtgagggttcgataatcctcctctgagaacacgtggtcaatgtcttccatgccccagtcttccaggagctgagcagatgatttaggctcctgcagaaagagcaaagtcaagtaagtacctgccacctagtgcccacacttgctaagcaaatttgtgtggaaaaatcagagtaacagagttaagaggaaaagaagagaaagtgttctaaagggcagtaaggtgtctaggaaacaaaaagacaaaagtttaacagtacaaagaagaggatggaggtccaggcacctttgaatcatcatcatcatcctcctcctcctcctcctccttccgcttggatttgctcttcttctctttcttaggtccaagcttcttcttcttcttcttgccaggagtatagtcgctgccctcactgtctgagcgcagagccacctcttcctcctcctccacaaactctggcccctccccagagctgtcccccagctgccggcataagagcatacgctggagcagggcaaggggggaagagggagacagacacacacatgctacacacatgctgacctcaggacagccctgaggctcatccccagaacatggcccaccacttctgagaaagaaacaaatgccctcagcccttcaacccttctcagagctcctcccttcttcctctgattccccgtaacattcagtcacccactcacctcctttttttggcgcttgctcttagggattttagggtcccgaggtttcttaggctttttcttcttcttgagctttggagtctctgtttctgacaaatcctcttctgggtcctcttcattttctacatatatttggcaaagagtggtaggcagggaaaagatcaatagcaaaaggttaggccctaatccagaggctttagactttattccccacctcttgtcccagattcctctgaagagaactgctatactctgtacaggaggaagctgatacccaggacaaaaacagacaaagagagagctgtatatacccgaaataggcctgccaggccagaccaggcccacctcgggcagctgtccagacccctgcctcctctctcccgttcctaccagtcctctagatgttcaccagtacagctgaactgagctgctcagagttcaccaagtaagagaactagatttaggcctcctgtaactggccaccaagttattctataaaccagggaatgagaatgaaagatcctactcagaaggcaaaaactatagaatataccttcccagaacaggatcagttcaggggtctcggaaaccacacccttctctaaccactttgaagtcatcactgctcaaattaaccagaacctccaagtcctaggttcaggtgccagctcaatctcatgcccacttctaaaatacaatttcctttccccatctccaaccctaatgttcctcctcagcttctcctgggtcagcagcctcttctccctaggggcccgaatcagcccagctgtcaccatctcccctacacccgccccccagcaagcctcctcccatctggctccacctcctcccctggctggaggcacacacaaagcctgggtaagactgaaagctcctgggcaaggataggtgggaagggacacagagaagaccaggaggcagcttcctttgtaacagacattcacactggctccgactccctcctccctcctctctccctcttcccaagccacccccgcccaaaggggggtgggtagagaaaggagtggagagaagaagggagtgcctcacccactgaggagagggaaaatggctcctgaccgcagaagccagcccagggcacccagctgccaacataggacagacaggaagtggcaggggagggggtgggtttgagagaggtggggtggcggggggggagactgccctcatagaagcctccccaaattacctggccccaggtccaaatgccacctactctgggatgacaacagttcacaagagcccaccctaacatcctaagcaaggaaacccaaggaaagcgagacaaacatgaaggtaatactaagagaagaactcgatcactccctcaatcataattattttttcaatcatcagagctgagatttaacaaaggctcagtggacttgtggtcagcgcatacaaccttctccccaaatttctgatacccaaaagatttagtttgaggaatggaggcccacaagaagtctctgaagctcagcttcctcaccactcccacccagattcctatccaacatatgggaatgtctgcacaaaaaaacagagcaggacctagacagtggtagaagagaatatcccaatcgggtgcaatggctcatgcctgtaatcgcagcactctgggaggctgaggcgggcagatcatttgaggtcagttcgaaaccagcttggccaacatggtgaaaccctgtctctactaaaaaaacaaaaattagccaggcatggtggtgggtgcctgtaatcccagctactcaggaggctgaggcaggagaatcgcttgagcccgggaggcggaggttgcagtgagccaagatcgcacactgcactccaaccttggcgacagagtgagaccccatctcaaaaataaaaaagaaaataatatccctccttcaatccctgacatgttcttagctcttaacccccaaaattagccctaaaatgtctctggctccccacttcctgagctagacagatactagggaatgagacattaggctggacaaagcaccatcagcctccctgcttctcagcccagaataagaccaggcacaagaacgcccctcccattcccccttgggaatgcaacatcagcctggatttcaccagaaagaatcattttcttaaggacttttccccaccaatccccaagtcaacccccaacccccatcagctacatctcaccacccccataaaagctggaagtggagacaaagacaacccatggaggcaaaggggacatccttccatgcacatggagccccccaaacttctcaggcaaataatatgctgaaatggcaaaccgcaaacttactgagatatagagaagatttaggaaagggacaggaatggggtgtggcaagtggaaaaagtgggtcatgctacagctcaggacagagttcacagctcctgcgcagctcccggtcaacatgaaaggcagccccagcccaagtggccaatgggaggccaagacgtggaacccagaatgtttaggcagcactactgtttctcatgcccctctcagaaggacagggtccccttaccagcaccacaactccgccctcaccttgggcaagggcatggaaatctgccccctactctacacaaggatgaaaccaagtttctcatcccaacagcccagactccatgacaacactaacccctctcctaaatggcctcaggttgaagtgaagaattccaacttaaaaagtgccaaatgtgaaagcatctctcccagaccacctcaacttccactgaagctaagaagagagaaggcagaagtgaatgatgctggatgagaaacaaaaacaggatcagcaggctccagaatgagaagaaaactagaagcagaaggaatgaagaaatgacatgtagaaaaaaaaattaaactagaaaacatgaaggtcaaggagatgagtaggtgacacagctaggggctctgaaaaaggacacagaagagaaagacatctgcttaggggcatgacatcaaccatcatttgaggatagacaacagttcccccaatcagacagggtggttacaaccatacgggtttggccagttcatgaagccaccccaaaacacagatagcgtaacccctagcacacctacacagacacttcacactgccagcctaaaccgcaggctacctcatagagacagaagccactaggaaaaaagccaaaactatgtccactcaccaggaggaggagtgccctcccttcttttgcccctcttcactaggctattacatcctccccgagcccccatcacttccccactcaaaacattccagcaatctgcctggctgctttaagcactccagatcctgctgaggagcgcgattcaaacttcacacagttcagacagcacagaaaaccggtaaccgatcagaagctaaaaataatcagatagagtgtaaccagcactccctctttcctttccacagcagcaaccacaggatcctactagcacagatgcccggctggtctttcaaacagaatcctcaacgcccccctccaccaccaccaccacaagcctccaggggtcccagctacctgcattcctccgaggacccacataccaggtaatgcctgccagcccagagagctccctcaactgggaactgcagagcattcctcaagacagagtgcagcaagctggcatctccgtgcccaggaggcacatggcttccacccccctcacaccagagctccgcagaagggaaccactcccttcggataccctccacctccggctctgcacagagacagcggagcaacacagccctgcctcaccagaggagtcactcgggagagccccagatgtctccttcccgccatgggcccttggggaagatgttacctgggtggggtgggggcaggctgttgttcaaaagtgcatccatatcctcctcctcactgcccgccgagcagggggacggggagcccaggcccgacgccatccccttccgctcccggccagggaattggcccagctgctcctgccggcggcctgaggacctctacactggcccgagtcactgtgcgggggaggggggagaaacacagaacagtcagtgacgcgcactgtccccctcccccacacccacccgctctttccgccccccaccccagccaccctagcagggcacccgaaccgctcaggctgaacttagttccacactcctcgggggcagcccggaagccggctccccggcaggcgcccccacggagcgagggagcgacgcctccgagggcaggctggtgcaagcgcggggaggggagacgcggggctggaccgagcggggtgtgacgggggagggggtccgagtggcagcggcgcgggggggccaggggaggccgcaggcggcgaggcgctcggggacacaaggtcacttgggggtgggggggcgcctccctgcgcccggggaggggccagtccccagacagggcagctctccaaaggctgtcctctgggacaactcaggttctcctcaagagctgcggggacgagggggcgtggaggctcgggcgctgcggggggccggaggcagggacgcggggggcgaaagcgtcccaccgggaagggggccgggccacgtgtcccggggggcaagtgatcaaagggcgagggggtgggcgccgggcattgtgggagaccaagccggaggcggggggtcgcggggagcaagactccggcagggttagggcgggggctggggaggaggccgggcgccctgcagggccaggaaaggaagggtcggctcctctgggcaaggggcggtccgcgggtccggagacgcctgaggaaggggcgggtgacgggatgaccctcggggctggtagggccgtgaggggcgtctctttgggaaccccgcgctctcctcaccccggagccgccgcaggtcgcgctgggtccggctcggtgtcactcccgctccggctcctcctcgccgcggccgaaggggggaaaatggctccggctccagcgtcgcctcttaaagggcctgaaacaccggccgggaaatcccaccgcacaggccccgcccccccacggacagcccataataacctcaaccaactccaaccccccccttccactaccgccaccctcctccccaggtctcccgggcaacccccgccccctcgtcgctcaggcaaccactggccacgcccccttcngagcgggcgcgcgcgcgtcacctgggcaaccgcccacctcctggccatcccataatacacacggacacccccccccccaacacacacacacacacacacacacacacacacacacacacacacaacacacacacaccctgcccccccacatttcatacacatatgccagagactgctgacatctcaaaatattgcagaccttttgcaactaaccctcttagacatcccataatagacatcctttgccaacttcttcttcactcttggacctaatgctaacatcccataataattcatcacccctccctccccatggccatcccataataagcacccctcgcagcacttatgcctcatatcccataatattcagccccatcccccacagacatcccataataaccatccttcatccacccccagtttgatatcccataatagtcagaaactcacccccccccatactacaacaacggacactcggcctcctcccacacacatcccgtaataatcagtctcccactttctatactgacatcccataataactaaccccctagagctgccctcagtccctgcaggccagggtctagaggctcacatcacccccagccttccctcttctagctccacagcctatagtaagtacccctcctctatcaaaaagataacccataatgatcaacagccctactgtcgccccacagatggacatctaatctcttttcctctaacactggaaagctatcccataataattttactctcctacccacatcctgacatcccataataattgcaaggagcccgtggtcaaccaaacataccataatactcccaacacaacccagtgtcacatcccataatgcttcatctccactctaccacccctatacccttcgagccaggcatcccataatattcatattcttcccacccccatctccaggcgctgtcagtctattctaacacccagagcagggagggccaggcaggctacccacgcttccttgtccccgcccccacttgcacacaccttaatccctttctgggccaaagtagtatcctggcaaaaagcctcctgatgtctgggaccccagcttccctcataccatcatttccagacactcgggggctgggagcccacctagggccccacccagtcccaccaaaatctaggtattttccagatgcttacctccagctcctaagttttgaggaacaccaaccaaccaaaataccaagctgacagatgaaacatttacatgaagtctaattcaccctacagcatcccataataattaccaactcccatccaaagactatctctcaacattctagcaatcctccccctcaccacatccccaggtcagggatctttcaccaacacccccaggccattcctggggatggacatcccatcacgatgtgaactcaggttcctgctctatacacaccaagagtgaaggcctgccctcccgctactcaccactactcatgttcattcaacctgtgttgacagagtacctagcaaggccgagctccgcaccatggagaatcaaggaagaccagggggcctcccttcaaaaagcataagcaaccaagcaaactatgatacacgacagaatggtgccaagggagaactgctgagcactgtttcccaatttcctgttacagaaaataaaatcccactggttccaagagagaacatatcccaataagatttatcgtggtccttctagaggctggaagatgatacttaaaggatttatgggtatagaccatagtcaacatgatctcctatctgttccctacttactaggggatttttcttggaaagcaatgttcatccatccagcattcctaatactgaaatcctataatatgttcatgtccttccttcttaagagactccacaatataccagcattgtttccctcattcttgaacaccaaatcctgcttatcctcaatgtcccatatttttcaggcactttcccattttatatcctgaagtctcatagtatctccaatggcctccatcctcatcttgttggggccacattctccacctcaaaaaaaaaaaaatctttagttgtataatgttccccatcttcccctgcctgtatagaagtcaatattccagcggggcatggtggctcatgcctgtaatcccagcactttgggaggccaaggcaggtggatcacaaggtcaggagttcaagaccagcctggccaaaatggtgaaaccccgtctctactaaacatacaaaaattagcctgacatggtggcacgtgcctgtaatcctagctactcaagggctgaggcaggagaattgcttgaacccaggaggtagaggttgcagggagctgagattgcaccactgcactacagcctgggcaacagagcaagactctgcctcagaaaaaaaaaaaaaaaaaaagaagtcagcagtccaggaaaccttctacattgaattatgccccaaggtagccctccagcgtataccatctccttcccttattatgcataccctccagccaccctatggacccaatcctagaagctgaaataaccgaattttttttgttttgttttttgtttttttgagagacagggtctcagtggcgcaatcacagctcactgcaacctcaacctcctgggctcaagtgatcatcccacctcagcctcccacctgtagctggaaccacgggcatacaccaccacacccagctaatttttaaatttattgtagagacggggtttcactatgttgccaggctgatcttgaacttctggactcaagtgatcttcccacctcaggaaagagcctaatttttttttttttttttttttttgagacggagtttcgctcttgttgcccaggctggagtgccatggcgcgatctcggctcactgcaacctcagcctcccaggttcaagtgattttcctgcctcagcctcccgggtagctgggattacaggcatgtgccaccatgcccggctaattttgtatttttagtagagacggggtttctccatattggtcaggctggtctcgaacgcccaaactcaggtgatccgcccgcctcggcctcccaaagtgctgggattacaggcgtgagccactgcgcctggccaggaaagagcccaatcttaaaaccctttggccctcagaaaacctaacccatcagcctgtcacttttcccttttcctgactcccagagattcaggacctgagtgaaaaccaatgtcccagcaccactgccttgctgccctaaccccaggccaaggataatgtctccctctgctcatgtaccttttttgcatgggtccaagacctatggaagtgggacgagttgaaaagaaacttggacttccttgtagaaagggccctttactaaccagtagtgagtgggatgaacctcatgccatctctgcattacccttctcatctcattttcctagaggaaggcctggccagatggctctccccttctctaggatccaagggactggagaactggtacaaagaaatgagttcagggaaggcaagagcttgcctcagggaattacaatccccctgctcctgagcagagcaccagggatgcagacaagtcttccgctagctcctggctgactctgtagacccactagcattccacatttaactctcctcatcttaggactggagtttttggcatcaaagacatcaggtcctgtcaaaagctccctgtcacctttgaagtaggtgttttctttttccaaccttcccttcagctccctggcccaccctcttgctgcactcattgtggcaagcgggccattctcccccgttctgcaaggcttccagtttccctcgttaaatgctctcgacatcaagactgggccccatttacttacccaagccctctcccatacttactctgagtactaagaatgaaacttgtgttccacaatggggggtgaggaggcagctcttttcagataccatgatgtggggacacctcctttcagggaagtttctccttcctacagagggctgccagatgcctattgtgcgctcttctaccctcatttctccaggggatccagcctgtctctgggcctcaaattcccttctgcaatatctccatctgcccatacccatactctcatttccacagtgatctgtccatataaaccagtaagagagcgtttgggtagtcacagcctcctgcctgtgactaaaaatatccacattttatttatccatatatcctttgtccactactcaccctgtgtccctattcctgtaggttctacccacttcttcctttgctgctcttgctccccacctctccctaacaccacaacaaggagaaagttaaaatcccttcctctcttcttgagttccagaaagggctcggaggtgtgtgctggtgtgttgctttgtagtccttatgcttctacgcttcccctccctcctctagccccgtgctaccctcccagataaattataaataaaccactagcatgactggcccagggagactaagggtggcataatctcctaattaatgcacccaggagggcagcctctctagccagttaccttagagttctgttttcatcccatggtacagaagaacctagaacaacactcagagtgggttgttcatggagtttttagcatttgctctataattcctctccttacacctctgttttgtgtgaacctgaaaaactctgttcataagaggtccaaggggccacagtgttctcctgctctgtctgaaaaggggattttgggagacaacgagggaagcaaagccacagtgacagtgcactccaaaggctagacaggatgcagatcacgtggggcttgggggtgacatgccaggtgtttgtatctcaggaggcaacctactatctgttttttgggtgtgactgcaaggtagcaaagcgctccgtgcacaaccccccaacctaagcaaagtgctccgtgcacaaccccccaacctaagcaaagtgctccgtgcacaatcccccaacctgagctatggtccccaggctcaaacccaggaagacaaagatggaagggagacgggtactatcgccatccatgactactactccctttggtatgccacccggccagaacatctcagttctcatttgcagtgcagctctgcaggccccggactcacagggcaaccctgtagcgcacaagctgtttaaaggacccaggtgtccagggttcagatttggctcgctggagcctgccccaggggccccttcaaacagctgtcaccaaagaaacctctccagccagttactcctgccaggcctcaggtccgactccagggctcaccctaccctccccagctccttccctccctcttccttccctccccctccccacccctccctagagtttcacctctcctggacagccccacccagctgtgcagggcacatcccataataatcctcctcgctagccttacccccccaaaaaaagagaggcggccatcccataatagccacccacaagagacattccgcggtgaccgccccctccctgcagagctgctgggagcagccatcccataatagctggccgcctgttttactggttacggctgtggagggagctggagaggaaatggaggggaggggggaggggagaaagatccagggcccccactttgtgggatgcagggagaaggggaaggacggtggtataaggggctagggtgcagaggaggccgtcgtgcaggtggaaggtgtgatccactggccaccaccaccctgctttagggctttctccccattcgccaggggctacttttctcctcagcaccccggaggtggctgctagttaggggagaagcccgggatgggttgaggtgcccaaagtctgtgtgtgtagggagatgggtttcaggtgttcctcttggggagtctgagagaggacggtgaccttagaaaggatggtaggcgagtaagggttgaggaggtgggggggctggagaagagctcctcaggccctccccattctgcaccaccatcccataataatccccccagccccactccccctcccacacacgacatcccataatatcttctggagaagcagtccccgcagtaggtacaaagagctatcccataataagctcccccacccccactcaccaccccccccaacttggccccccctcagtcacatgcagccggtgccatcccccgctgctcccccctctggccaccgaaggccttgccagcccataatactcttgcctctggtcgcaggaggcctccagcccataatactcccttccaccaccacccccccttcccgccccgcaccccttcctcccgcctccagttggagccgggcctcaccaacccataatattccccagtctcctaaggctgttccagcccataatactctccctgtctcctaaggcctctccatcccataatactgccagacgcctgacctgtgggccaaaccccagccagttccacacatcgaggctgtgtcagcgccgcaggcctccctccctgtccctcctccctccctggtcggcgctttccctcccaggctttctcccgccctcctgccctgggcccctctcccagccccaccccgtgcctgcctgggccctcgcttcccctccagcctcctcccttgccctttctccattgcttggttctccagccagcttccccctgtcttgcactttcctacctcctccttggtctgtgggatggacatgggcctagtggggagagagtgcccccagagggcaacaggccagtcgctgcccctaaagactgcctgcttgacctagcaccgtggaaacctgcccagcctgccttgctcaccacctcccgtggtcctacgtctgattgctggcagagctctgtctgggtgaggaaagagcccttcaggtcttcgggaaacactccccttgggcatcactggcagagttgatcaatggcctcgcctccccatgctcttgttggaaagaaggagctcccacttatggggcatctagagtacctttcaaaggtgggctccttgaccctcacaataacccaataagtggatattatgagccccatttcacagagaaatgggagaaaacagaggctcagagaggtcaagaaatttgttgaagccacattgccaagaagtgagagagttgaaattaatgcccagatttgtttgattccaaagttctggagcctttgggattccccaaaccctgagtgagaaagttcaccttccaggactttccgtgctcctctggcaaggacaacatggtgagaattaccccaacttgtccagggccttcctgtgtgagattaaccttccgttccccgtttcttccatgggactccaggtggcagcctcgagggaattccatcttcaggatggttgaggaccaagaaggaagaatctctgccctcctttgatatcccttacctctgccctggctctcctaaatttgttttaagattaatgattgtggccgggtgtggtagctcacacctgtaatcccagcactctgggaggcagagtcaggcacatcacatgaggccaggagttcaaaaccagcatggccaacatggtaaaaccccgtctctactaaaaatacgaaaattagctgggcgtggtgacgcacgcctgtaattccagctactaaggaggctgaggcaggagaatcacttgaatctgggagggggaggttgcagtgagccgagatggcaccactgcactccagcatggatgacagagcaagaccttgtctcaaaaaaaaaaaaaaaaaaaaaaattaaggccaggagcggtggctcatgcctgtaatcccagcattttgggaggccgaggtgggcggatc

SEQ ID NO: 115 - DNA, 1264 bp, Homo sapiens
  Genbank Accession No. AF052094
atggaatcctgctcacaaaatcactttaagatcttttcgaagctgttaatttttcttagtgttgtggacactgcagacttgtccagtgctcccacggcctgtacggacactgtggaaggcctccctctgtcggctttttgccatctgtgatatgccataggtgtgacaatccgagcagtggagtcattcagcgggagcactgcgcgctatcccctcacattctctatgtactatgtatgtatgtattattattattgctgccaagagggtctgatggcacgttgtggggtcggggggtggggcggggaagtgctctaacttttcttaaggttttgttgctagcccttcaagtgcactgagctatgtgactcggatggtctttcacacggcacatttggacatttccagaactaccatgagatggtttagacgggaattcatgcaaatgaggggtcaaaaatggtatagtgaccccgtccacgtcctccaagctcacgaccttggagccccgtggagctggactgaggaggaggctgcacagcgggagagcagctggtccagaccagccctgcagcccccactcagccggcagccagatggccccgcaaggcctccagggatggcccctagccacaggccctggctgaggtctctgggtcggtcagtgacatgtaggtaggaagcactgaaaatagtgttcccagagcactttgcaactccctgggtaagagggacgacacctctggtttttcaataccaattacatggaacttttctgtaatgggtacaatgaagaagtttctaaaaacacacacaaagcacattgggccaactatttagtaagcccggatagacttattgccaaaaacaaaaaatagctttcaaaagaaatttaagttctatgagaaattccttagtcatggtgttgcgtaaatcatattttagctgcacggcattaccccacacagggtggcagaacttgaagggttactgacgtgtaaatgctggtatttgatttcctgtgtgtgttgccctggcattaagggcattttacccttgcagttttactaaaacactgaaaaatattccaagcttcatattaaccctacctgtcaacgtaacgatttcatgaacgttattatattgtcgaattcctactgacaacattataactgtatgggagcttaactttataaggaaatgtattttgacactggtatcttattaaagtattctgatcctaaaaaaaaaaaaaaaaaaaaaa

SEQ ID NO: 116 - DNA, 59747 bp, Homo sapiens
  Genbank Accession No. AF119117
  unsure (1)..(59738): n = a or c or g or t
gatcatgtctaaacaatgtcattttatgatagcatcagttcaccaaaaggacaaatgtttatgtacctaataacatagcttcataatgaattcggcaaaaactgatagaactgcaaggagacatagagcagntcacacaattatacttggagatttcaatacctctttcccaatagttgatagaacagatacacagaaacttttaaggatacagaagacttcaaaaacagtactaactaacatgacctatttgatatttatacaataattcatccaataatagcagagtgcacattcttttcaaatgcatgtgaaaagcttaccaagatcgaccacagtccagaccataaaattccctttagggattcaggtcatgtaaagcaagttctccaacaaagaggcaaataaatttgataccaaaatgaaaaatacatttggcaaaaaataaagaagnatatccagacaatcttctaatatttggaaactaatcacatatctaaataacaatgggtcaaagaggacatcaaaagggaaatcagaaaatattttganctgantgaaaacaaaacaacatatcaamccttttggaatttggctaaatcagaacttagaagaaaatctagacatgaagcctgcctcagaaaggaataatgatgaaaaattgatggcagcctccacccgaagaaatcccatgcgggactnnggaagaaattgaaaagttgnttccaaaattcatatgaaaaagcacaggaccgagaatatgcaaaacatctnngaaaatgaacaaagttgtctgacttacattacctgatttaaaaatgtattacaaaaggancataatgaagatagtgccattttaatctcctcaggctgccacaacaaaatacaccagatttgggggcttaacagcagacatttgtttctcacagttctggagactggaaatccaacatcaaggcagctgattcagttcctggtgaggcctctcttcctggcttgnagatggccgccttcttactctatcttcacatgggagaaagtaaaatggagagagcttcctcttcttataaggccacagccctcctgggttatgaccccaccctnacaatttaatttaacctaatcacctcctaaagtccctatctccagataaagtcaccttgcgggggttatggcttyacctatgatttgggggtaaacaattcagtccacagcaagtgtggtattagcatcaaaatggattaacagatcataaaacagggagcccagaaataaacccacacacatacatacaagtgacttttcaacaaaggtgcaaaagcaactcagcagaacactgaacaactggctcttcggaggtaaagtggtgaacttcaattggtgtcttacaccaagctagtttaaaaatgcattctatgtgtaaatatgcaatctataattttaaaaagtttagaggaaaacttaggagaaaatcttgatgatcatgaatttggtaaagatttcttaaatacaacactaaaagcaggatttgtgwragaaaaatggataaattagacttcatcaaaattaataactcttctctgaaagaatctattaagagaatgaaaagacagnccaagactgggaaaaatatttgcaaagtacccatctgataagggnctggtatccagaatagtaaagaactctcaaagctcaattaaacaaccccaaaggtgcaamagatntgaacagacacttaacncgaagtggcactgatgcagctaacacatgagaaattgttcaaagatcacgctcgttagagcagtataggagatattcctgtaaacatattaggatgtctaaaatttaaaagnctgnccatactaagtattcattagaatatgaagtaactaaaattatcatacnctgttcatggaaatataaaatgatacaactgctttgcaaaagaatttaacagtttttaaaaaaatagttaaacatatatctaccaaatgacccagccattccacaactaagtacntcttacctaccccaaagtaatgagagcctatgttcaaagacttgcacacaaatgttcatagtagctttatttgtaacagccagatgtccatcaataggcagatggaaaagccaagtacatcatatcccatatccacacaatggatactncaaataactaaaagggaattaactgccgatgcaatgatgtggattcttctcaaatatgctgaatgcacaagaacagacccagaaaacagtacttmctgtataattctatttatataaaattctattaaaaacacattgttctgtaatcatagaaaacaaatcattccancattttgggaggccaaggcgagcttatcacttgnggttgggagttcaagaccaacctggccaacatagtgaaaccctgtttctnctaaaaatacacaaactatctgggtgtggtggcgggcatctgtaatnccagctacttgggaggctgaggcaggagaagtagntgtnctgaggattcaaaggctncagtgagctgagatcgtgccactgcactccagcctaggtgacagagtgagactccgtctcacaaaaagaaaaaaaaaaagagcaaatcagtggttgcctggggatgggaagaggtaaagagacacagacagagggaagtcagcgagggaggagcaccgccatcatcttctgtgtgatcgcgttgccatgaccccatcagtcactcaccaaatcgtacacttggaatattgcatatccattacacctcagcaaggctgtttttaaaaagacacaaatgccgagataattacagaaaaaaagtccaattagttttgttaggatggtggaatcatgaaaggcatctcctaggtcctccaatgttgttctttttcaagattcttttggctactctaggtcacccacatctccaaacacattttagaaccagctggttaatttcttcaaaaaagcaagttagaattttgattgagattgcattgaatctgtatgtcaatttatgaagaactgacatctcattaatattgagcctttcagtcacaaacatgcacactcctctgcttgtctagactttcaaaagtttctcacagcaatggattctaggttttcagtgcacaagtctcggatacggtttatccccaagcattttgtttcggatgctattgtaagtgaaattattttaggttttattttagaattgtttgctgccagtacatagaaatacaattggttttcatcagatcccatggccttgctaaattcatttataaattctagtagttttttgggtaaattcctcaagattttctacaaacatgaaatctaccaagaaaaatcttgtcatcaatatttcaatttttggggaagcctcctgctctgtagccagacattcgccactgnctatgactacatttagggccatcctctggccatccctccttggntagatgatgaacctgatgcatggtttgaatatgtgcccactgggaagctttctttcactggtctttcacagaaggccatgatgacacagcctttcactttctggtgggggcagtgtgctgtgtatagacacatgtaatccaggccccaacgaatgcattttctccgntcaatgtcataagaaactctcatgtagccagaggtctgggttaaggaagcggtctccatgcagcaagagtgggtgcttgttcatggaacttaccgcgccttccagacctgctcaagccttgtgtcgtaaacattccacctgaggacggcaggatgctgtctacacaacctctgtgggtccgataacaaatagcttctgctgggacgntcagcttctatggaaacagagctccctgagtttctgntatggctcagggctgctcttactcaaaaggagaggacgtatttccaggagagcgttcagctcttattcaactgttattttctgcgctgcctacaacatctccgtctgacacagaccctccaattcccactggttctgccagatcagtgttctcaaagtgtggttcctgggccagcagtgtcagtgtcacctgagaactttctagaaacgcaggtcctcaggtcccacctcagacctactgaacctgcgtctctaaggatggagcgaggtgatctgtgcctcctatgcatgtaaaggtttatgtaggtgactgtgatgccagctaaagtcggagaacaacaccagattgtgtggcctcctggggcagcagtttgcccatccagaccagcagcagaatctttcttactctgggccctactcaaaaccaaacgctttatgaagaacacaaaacaggccagagaagcatccccgagtgtcttgcacctcaccttgcaaatcggaagagcctcaccaggtatgatacttctttcttagtggtagtcttgcttgccagagacagcgtgttttctttcattttggatatatattttgaccaatcagaccaatggacccacagaaagttcaccaaggtggcaggttttgaaaatgtgttattttctctttcaatttttagcaagcacgtgtcttaccaaggcatcttggcatttttcattttttgctccccaggttgattcagcctgatgtcatcagtgtggcagaccactgtgacatnctgtgcagtggcaagaccatcaagatgtctgtgactaaaaccaccagtgakccggaaaatgatacagctctgagagaagacattggaagtgtactgctgtccctgccatgcgagaggaaactatcttcctcctgaggtggcccccggggagggcacaggggtgcagcagtgagcagggcctcctscctggakmcagcaccttccatcattctcagaacctggacagacaaggtctgggatctgacctcccacacccctggacaaaagccactcctgcctactggtcccctcacccttgccctccccaagccccctacccccagggnctttccagcaccagtgagagagcngggtcnttaaagnctgagntgggctccctgggacttcctctgtaagnacacaggacaccctcaatatagnaaatacacaggnaggnanatgnctgtcatntcactcncnctgtctttgtcncctctcaganacagcactcatggggggagcatcsacgctgtcttccaaatcaggcgagacacggcgcaacatccagcactgaggncctcccaggaggcagcacccaaggagggggggacccgtgggccaaggttgctttggagacagcagtcagtggccaggggctccctgtgggctctgcagctgcggtcccagccagtggggagaggcaccgagcatgggcaggaagtgcagaggcaggggggctccacctgcctgcacccaacgccctgagcccacagcagccatagcagcaaccacaatgataataaagccgacttggcatttagggcaaagttccaagcatgcaaaggtcggccgtttgatcaggtctgatcagctcataaccacactgcttctacctgcacagntcacggagcattcctgttgtgggaggatggagacccatgggtctggcagctgcgctttctctgtgtcatccatgagcccaactcccgcagttagtttgttcttagagcacccaaagctcctttatcctaattcatgtggttggaagtcggggttgaggcaggggtggaggaatgctctttgtcttgacagagtgcaggttacatgtgtgtgatcactcagtggcccctcctgagtgtggcaggtgcattctctgtgtgctactggtcagtaaggatgtggctgcctggatctgtgtgacctctagtccctgcaccttcctgcctgtaccctgttagctttgggtcacaattctgcgctcctgcagcgcttgcaatcccttcccaaacgctgtttgcctgtgtgttgttttgtttcgagacagggtctcatcctgtggcccatggcgcaatctcagctcactacaacctccacctcccagcttcaagctattctcccacctctgcctccccagtagctgggactacaggtgtgggccaccatgcctggctaattttttttttcaaagtcagggttttgccatgtggcccaggctggtctcaaactcctggcctcaagagatcctccttcctcggcctcccagagtgctgggattacaagcgtgagccctcactcctggcctgtgtatttttaatatacctgaacatccattctctctgtgtgtgtagatttaacagagctcccttagtcacctgcaaagtcttttccttgggagactgtttcctcaaccctgctgntctggggncaagscctggctcactcctttttattgaaacctgtgccatggagataataggggtagagagatcccttctgtggcagccactgacacactacagnttcgaggtggcacatccccctctcctgaagtcccctcacctccctggcgatgaagtcccacccctgatgggaggtggtgtcaggaggccttcaggtggtcaggccaggagggctccaccctgaggaatgggaccagtgccctcataaaacagaccccggagagctctccccagcccctagcgtggggagatacagggagagaactgtctgcaaccccgaagcggccctcaccagacacagagtcggccaggccttggcctcgggacaccggaaccgttagaactgaaggcttctgtgtgagcccccaggttgtggagttttttgtcatggcagccccagggggtcactaggctcccacttgattccaactcagcgtgaagtcacagccctgagtgncttctgcctgggtgccagccccggagccggggagccggggagcggggggcggggaggggagtggtggtgtgcggggagtgcggggcgggcgcagggggtggggcaccgcgctgcgggcgggtactgcggagtcaggcaccaagggtccctgcctccctcactgctgagcgcgggctgcaggctggaatggctggagagccccagggctcgcctggacgcccagggcagggtgctcacgggagcatcgagggtacacggggaggaacgccggggttcgggcgaccctaggggcgacgcacagagctgggcgcggccactcacctcggtgccttctaaggacctggacatcctgggccttggcggcccgggggctccattcctccgcgcgctgaatggaagaaatcccgcccgggcatctcggaaggaaagcctcggagtccattcggccctggagccggataccaaccgccagggctttccaggcccgtcccgggaaatggttttcttaggcgagtgcgaggcgggcccctcggttccgatgcaggcgcactagataccggcaaggcggggactaggcctaggggacctcggtcgcctcgaggtcgcggagaccccaaggccacggaaggacccgcgtctccgcagcccgcacgccgggaagcgtgcagagtcctcggcggggtcccgagcccgctggtcagagcgtggagcggcggggtgggagggacgtggtccccagagcgcggggccaccgtaggggcccctgatggggagggagggaagggtcggcccgacggggtcccagcagttccccgcgcgcagccgctcggctccctccccgtccagctgggagccgccagccctgggcgtccgaagatagcgggtgcccggggcagcccccaggggtgcgggcgagggcgcagggcggcccagacagttcccgcgtggaaggcgcccgtctagatccgcgacgtctcggacccccaggcccccgcaccccgtgtccgaggctccgggacgcgcaggacagtggagccgtggccgccgcttgctcccagccatctgcgtccgggaggcgggggcgggggcgcgccccggggaggtgaggaggaggagccaggacgcgagggcgaccccgacggcgggagggcggggcggggcggaccctgtctactggataagagcccgaggccgaggctgagaccgcccaccgctccggagcgggaggggaggcttcgcggaacgctctcggcgccaggactcgcgtgcaaagcccaggcccgggcggccaggtgaggccagcgtcgctcgcggcatcggggcgccccgctccttccgcagaccccgaagtggggcgcaggggcgggggccgggggccgggcacagtctggggtccccgcgtcccgcagaccgcgccgtctccaaagtcgccaacagtcgcgggtgccgagcgccccccgatagcgccacatgggaccctgaggccgtccgaggcgcgaggagggtgcagggctgcccctggccccgctccaggctcagaaccgggtgggcacctggtgcagtcaccggcttaggggacgcgtgggtgtctatggctgtgactcgggggtcctggtttcttctcgtggaacttaaccctactaggggtgcggcgcatcccagatccgatcggagtgggtttagcacaccnccnctccatctcgggggggctttgtctgtgtngggggtggtggcgggcgcgggctgcgcgctggtgctctgggcagggcggggaggccgggcgaggactcgccaggcagcgccgcttcttgttctgggcgcggtgaggaaggacgctttctaacgggacacattttggtgtgtagacccaaaactcgcctctgaggccccgcgtacaggagcggggtcaggtggccccagggcgggggcggtttgccggagactcgcgatctccgcacccgacgccctctcccaacggggtctcctgctcgcgccgcggaaccccttcgtcgggtgttttacccaccggaggggtcgtgccggttgaggttgacaccgggtgcgtggtatagctcgtgatagctcatgggtgaggttgtgtacaaacttggatgcagggaaagttgccttttagagcctccacctganacctnctacagtcgntgtgtgtgtgtgnncacctgtgngagtgtnagtatagtatgtgtgtaagtgtatgtgctcncctgtgtgtgtgtgagtgtrwatgtntgtntgtgagtctgtgtgtgtctgtgtgtctgtgtgtgcgtgcgcncgactgaaacacgctnytgctggmtccanatsmcagaagtcgccctgnmtggggcggtgtagacnctcctgctctcctgctcagcgttacaggggggtttatgtagccgtttggacaggatttcccgggttaccctgctggcccaggagctagntcccgcgatgaanccctgtccatcctccgcccagctctctcacacggggtggtgccacctgccctaggtggatgtggcttgtacagacactttttgaggaagcagttgtgatggttatgtctaaactctctttacagtggctgattttgcttatataaattttgctctttattactgagtataaacaatacaancccaggcttggtggctcatgcctgtcatctcagcactttgggaggctgaggcaggaggatcgcttgagaccaggagttcaaaaccagccttggcarcaatagtcagaccctgtctctacaagaaaacaacaacaacaacaaaaaaacacacacaaaaataacttagccggtgctgtggtgnacacctgtagtctcagctnctcaggaggctgaggtgcaaggatcacttgaacctaggaggttgaggcagtgagttgtaatcacaactgtattccatcctgggtggnagagcgagacctcatgtttttaaagaaaaaaaaaagaaaaaagaanacagatgancagtcatgaagacaatattgnatgctctnagaagaatgtnagattactctctggaagtgtgggggaaggtggaagtgatatccatgcattgttagtagaaagccacgctagagctcacacagccttgcactttgataggagtggggaggggtgcaggggaaggagaggcaaaccagagtgtctgtcttgaggcctccatgggccagtgccccagccctgtggtgagggctggcacttcccagctcccgtgccccagctgtaccatctcaggtgctgagaacgcacccatcccttcccagaggaatgcccgtgaatgcctcggggctctgccctccgcaccaggtatgtccctagccctggctgctgaattgttgcgttcctgttgtgtgtttatttttcatattggctgaagaccaagagggaagaagcacagaattcctcaactcccagtgtgcccatgagtaagagcaaatgctccgtgggactcatgtcttccgtggtggccccggctaaggagcccaatgccgtgggcccgaaggaggtggagctcatccttgtcaaggagcagaacggagtgcagctcaccagctccaccctcaccaacccgcggcagagccccgtggaggcccaggatcgggagacctggggcaagaagatcgactttctcctgtccgtcattggctttgctgtggacctggccaacgtctggcggttcccctacctgtgctacaaaaatggtggcggtaagtcccatctcagcctccctgagcatgctggccgggcgggggtcgtaggtgcagccggggccaaggcacgtacggaaacgagatgaagctgttcccatgcgtgaagacggagctccctgtgagagctcacggccggtgcagatcctcccagaggatgtcacaaaaccattgagcaggactcggagctgccttgtcccacgcctgcatttcagagtttaggaaagggaggcccgcgaagaagctggggggtggggggcggcagacggggcagcttggctctgcctcctgtttccagaggctatcttcgctttggaaagaaaattctcaaaggtccaaagaacagcctgcggctgactttggcagcctttgcaaagcatgtggaggccctggagcctggagtggcagaggaggcccctggaaagtgtctgtgtcccctgcaccctccagaacccagccacagagccagaaagcgaagatcgaggcagggccaccggggatgtccgagaacattggtgatcccttcccaggagcctctttgggcctcccagcctccctgcctggcctccctcattggcctctatgctaggtctgggaagggaggcctggggaagaatctggggggaagcctcacaggatgcctgcgaggaggctggcatttttatgcccatcttgaagaggggaagacagaggcctcagcaggtacaggaagttgcccaaagacagagctgaggggccccatgcctccccctccccttccccaggagagagagtggcaaagctctccctcactccagtcagaccaggggagcagagggaatttaggaggttgagaccagggttccctggggctttgtnctgggggtgggggaggtgcaggtttcagaggaactaggccttaccctggaggggctcccagcacctggggcagcaaagaccctcagccacagtcaataggggcagcctctgaggnccccagaanctggggacaggacggcagggcccactcagctcaggggcagagttggggggtcacagattcacaactcaagaggcaaagaggatcagggcaaagtggggggacgcaggccagggaagggcaccccgaaccaccacggggaaggatagtacctagagcaccgctgagcatgggcagggcctccctgtgctgctcttgggtttgacttcatggctcgaggtcgaggtgcgcaatgacaaggggatccaggagggacgtgtcaggcactgacagcagtggagggcgggcttcgggactcatctaccctagcctgggacttcccgttggagagtggggtgaaacggtcgggccaggacatggatggttgactggggtagccgcccaagctcccacgaggagagatgggcccttccgaggccccaaactaaaggtgcttttctgccccacaggtgccttcctggtcccctacctgctcttcatggtcattgctgggatgccacttttctacatggagctggccctcggccagttcaacagggaaggggccgctggtgtctggaagatctgccccatactgaaaggtaatatgcgggtgcctcccttcaccctggcgcagcgcggatcatggtggtgacgctggagctttcaaagcaagccagccgcatcatgggcatccagccctgctttgctaagacacaggcatggcacacgccacttgaacttgggtcccaccttaaagatctgcagtgacaaggactggatagttcattcccttgctctaggtgagggtcctgcaattcatttgtggtgttactttgtcaagatgctaaaatgtagttaagataaaacacatgtctatctatggatcttgccatctacctatcatccatcggtccatccgtcaatcatcttgttatcttatcttatccattatctatctttattattggtctttatatcaatcattcacccatctatctacctatctacctaatccatccatctatcatcatcatctatctgtatctgtttcctgtggctgctgtaacaaatgacacaaactgggaggcttaaaaggcacacgtttattgtctcacagctctggaggctggaagtccaagatcaaggtgtctgtagggttgatttcttctgaggctgtgaggaagcatctgttctagcctctctccttgtctcagagattgtcttctccctgtgcctctttatacttcttgcttctatgcatatctctgtaaccaaattccccgtttttatgaggccagaagtcctgttggattagggacaccctaatgacctcactttaacttgatcacctctgtaaagacttgtctctaaataaagtcacattctgaggtttgcgggttagaacttcaacagatgaacttgggggagggacacatcccacaattctatctatctattatctgtcaatcatctattcacccgtctgtcatctacccattcatccatctattttcttttgatccatccacctatcaatccattcatccacccatccagtcatccatccattcatctatctatggatctatcatccatccatccatccatccatccattatctattgatccatccatctacctatcgatccatctatctatccatccatccattcattcatccattcatctatctatggatctatccatccatccatcttctatctattcatctatccattcatccatctgttatccattgttccatccatccatccattcatctatgtatggattcatccatccatccacctatcgacctatccacctatctactagctattgatccatctagttgtcactgaacctttccggctgctgatgtcctgctctggcaccatgaaatggacacacctcgtgttgagtgcaggtggcctgcccagcaccaagccctctcccagcatttctgactccatcttcatgagaccctgggaagggcacacactaggtctctgtgttggagatgcagatgctgaggacagagggccggggtcgttccccctggtgtccccatcagagcagagtgggatttgatcccagacgtttctgactccccaatccctgcacgcaggtcacacttgcccagtggggccaaagccacctctcaggggctggtggttcagggaggattcaggcatttactcagaggcaccactcagaaaattggcattaagaaaatgactactagaaggtcagcctctggatactcatagaagttctggaaaagctgtgtgtttagaagacagccgagcccagcacggccccaggacgcattaccaatgggtcaggggtgggccttcagaggcgagccgctgacctcccttaggagagggaacagatggcatttcacagctgctgaggtcaggctccaggaggagaagtcagtctcgcagccgtggaaatgctgagactggacaggtgtgatggttcttcccaggcacgagactcattcgttcttaatgggctgcttagtgaatcttatgacttcagtaatttcttcctgggctccacattcactggactgcactgaaatggagctacaaaaagagggctccctccccacccccacccccacccccaccccacacacatcttcagagtgagagacagatgctttgggcatgcactggtgccagacgaccccttggcgggatctgcaggtagaagtcaaaccgtacaagaattgctcagaacatgcctccgtccccgtcgtcaggtccctgatatcaggtccccaatggaagaatgcagcagccaacggaagacccaggcctgttgttacagacagacaggggcgcgtgtcaaatccggcgttgcagtgaacccaggctaacagttcaagacacacgcgttacctgtgtcctgcctggccctggccagcggcacggacgtgtttcagagaggggtnctgcctctgagcctgcagtcgtaaacgatgctgagcttgcacccgtgggtccgtgttgggagagtatcttgagggctcaagagccttggggatgctgagtcaagagatgaagccggcccacctggggtaggggaaacttgaggaaagatgacattgtgctctggcacaggctgcagcgacaatccaactgtgctttgctggattttcaagagccaccctggagtctgtcacaagtgtcttacaaggcacagccctgtgccccactcccgccagtgagcctggtgttggagcaagttaaatcacctcttcacgtgcaggattcaggtgaggagggcaggagaaaaagggacctgtaggtccgcagataagagctcatttccttccgtctgtcacacagaaaggatgttcaccaacaaagctgccgttgtgggtcttcatggtgtagtccataaaatgtcaagaagcaatttctaagaatttcagagcaccaactcaacttgggctagtagagaacctctgacttccatcagcgtgagcagtgccacctcgttctgaagaaatgcagccggcggatgtgggcatatcatcgtgttctccacaatgcgcagccggggtaagctgggcagtcgtctcctctgtgtcacagaccctgtgcccacaatcccgcattccatgccgccagcttcgttctgaagactagtcccagaggagggctgcaaagtgtggccgcaggaaggaaggctcgtggccctgcgggcggatctttggaagagcttgttcacactcacctagtcctggtgaggaaggaaaattgcaaatcacagaaagtgaactgttcgacccacgaagggatagatgaatcagtgcaagaaagctggacttctttttagagacgagacaccttgagttgttgaatctcagtaacgctgcaggttccggtgccagcgtcccgtttgttctgcctacctgtcaagcgcaggatgccagtttagaggagactgacattgcttatgaaatcagatgtacaccatgcacccccggcaccctgatacatgtgcctttgtcctttttaaaaatctggttaataaaaatgcatacgttttcatgtctcattgaatagaagtgccacgtggtaaattaagacatcagctaaagtgcccacaacaatcattgtggagctaaaaggccatccagccctgagcaggtggcaattccatgggggaatgaagccagctctccaggaagcctggttgttcctggcccttcccctcctgcagacctgcgagctgctccctgctcctaactgggagccaagatccacccttgaaagccagagggcggagttcatggtgaggcccagctgctcagcagccatgactcacgtgcatttcccgtagtctcaccagagcagcttgggatgggcaccacagccagaggggcctctggggccttcagccccgcagtgcaccccagggtcctgagaggtgggtctttaaaactctccgtctcctcccttcccctcgctctctttccctctccctgtgtctctttctgtctctctccctcctttcctctctgtgtctctcctgttctgtctcttctcctctctgtctctctcctgttctgtctcttctcctctctgtctctcgggtacatgcacacacagcaagcacatactaaagacacccagactgacacagagaggcgtcctctcccctctttcttttcttttcttttctttttttttttttttgtgagacggaatctcgctctgtcaccaggctggagtgcaaaggcgcgatcttggctcactgtcacctgcgcgtcccgggttcaagcgattctcctgccccagcctcccgagtagctggggctacaggtgcgtgccaccacgccccgctaattttttgtatttttagtagagacggggtttcatcgtgttagccaggatggtctcgattgcctgacctcatgatccgcctgccttggcctcccaaagtgctgggattacaggagtgagccaccgtgcccggccctctcccgtctttcttccaaagacctgcttgatgcctcctgtgaggtatggaggggctgctccaccagaggcttcctccagcgggatccgtgcatgcgttgacaacaccctctcctgaagccagctctcgtgggtgccctggggtgtactggtgttcaggggtggggcagggtgcccgtgctctggtgggcgaagcaccatttgcaggcacgaccctcagccagcttctgtttgtcaggtttcggtttcattgccaagggcaaccccattttacagacgccctggaaaccccaccattcgattgtattgaatataaaatattttatagtcagtcatattttagtgtgatttctcaaacacaaaacaaactacacacaaggttaatataaagaaaaagatactaagcaaaaataaatttaaggaaatgggccttaaaagctatgcttgaaattcacacttagcgccgagcttcctgggagtcagacaggagggaagggaagcgccatgttctcatgaatgttttccctggaaacgcgagcaggggactttgcctgccacctccttggggagacagactcccgtgtcactaaatggtgtttaagaaatgtgtcaggtgaagcttcatctggagcccacagtgatgtcatgagcagagatcactagaaggttctgtagccaacagggtagtgggtttcctgcgtctgggccttcggtgagcttgaggagctcgtggtgaagttggctggttggtgaggggctacacgtcagtggcccaggtcacgggctctgccttcctgaagggcagggcttggagcaaccgaatgcctggccagtgctgacagtggccactaccgttcaagggagccatttcctcacccaggtgcccagggaagcatccaggaggggactggccaccaccgttcaagggagccatttcctcacccaggtgcccagggaagcatccaggaggggactggccaccactgttcaagggagccatttcctcaccgaggtgcccagggaagcatccaggaggggactggccaccaccgttcaagggtgtttcctcacccaggtgcccagggaagcatccaggaggggactggccaccaccgttcaagggagccatttcctcacccaggtgcccagggaagcatccaggaggggactggccaccaccgttcaagggagccatttcctcacccaggtgcccagggaagcatccaggaggggactggccaccactgttcaagggagccatttcctcacccaggtgcccagggaagcatcctcaaccaggaggggtcctcttggtaagggggactctggtgtgggggctgcactgtcccatggatcagagcaggcccatttgctctgggagccgcatcagccagtgtggccagtggtgatgtcatgcacagtggccatggtgatgtcatgctcccatggtggccctgccaatctgtggtgcagggcaggaaacaaaagcagtggctctggaaggacccagggtacactcagcccttccttcggactctggattgggatccactctggtgttgtttgatcaagggacttcccagggtttcaagctaaggattgatacagaaagttttaaccttgaaaaattttcaaattgggcatccattgtcagttaccaccatgggaaaaccctccacagtgctctctggaaacaatgtggctcaccgacagtgtggctcccaacctggctgcctgggtgagttcactgtggatcacaacccagcctctctcctaagggactccggacagacggtaatatagaattatttaatatggaccagatccacgtgggagaaggccttccaaaggcaatccgtgacagactgcaatacagaattatttaatatggaccagatccatatgggagaaggcttttcaaaggcaatccatgacagactgcaatacagaattatttaatatggaccagatccacataggagaagaccttccaaaggcagcagcttggctttcatcgtcaccactactgagcatgctttccaagggggattacccgcactcctgatcttagatttgtttaaaacaaagttttgagtcttctttttgctttcaaggtaggaagagaactttactgaggtgccctgagcatgagaacagcttctcctaaggattgagactataaaaagcaacccaggccaccccctgcaaaagtcaccttgaaggtatgctcctaccccggccatgaacaggcaagacggcatggtgcctactgggttttaaataaagtaaatcaaagttgtaacccaaactaatcatgtcagtaaactgagaagaaatgtggaaatgaaaaaaattcttcctggagcttagtaaagtgaaccccagtagcaagaacgtgatggtgcccatccagcagtgaacaaggaggaagtcatctgaccaccaggcccatctgcccaccagtcaggctgacaccactccaaagactgctgaccactgagttctgttccagtttaccaggagaccccataaatgatggatcccaaattccaggtctgtgatcctggaaaggacactctaaaagaccgtggatggcattgcatggccatggatggccctggctggtccttgatggtcttgcatggccctggaaggcctcggaaggtcaaacatggctctgagtagtccttcatagtcatgcaaggctctgggtggcccaaggaagccctggatgatcttacctgccctgggtggaccctggtggtcttacgtggccctgggtgattctaggaaaccctggatggtcatgcatgggtagtgtgaccttggatggctccacatggctgtaaatgagctcagatgactcttctgagtagtcttgcaggagaggcatgagcagctatagatggccacagatggccatagatggctatggatggctctggatggccatgggtggctgtggatggccatgggtggccgtagatagttatgggcaaatgcagatggctgtggatggctgtggatgtctgtagatggctgtggatggttttgaatggcaatggattgttgtggatggccgggtggatgtgggaggttgtggacagccatggatgactatggatggctgtggatggatgtggatggttgtggttgggtgtggatggttgtggatggttgtggatggatggatggttgtggatggccgtggatggatgtgggtggccatgaatggttgtggatggctatggatgaccatggatagttgtggatgtctgtagatggctgtggatggttgtgaatgacagtggattgttgtggatggccaggggtggatgtggatggccatggatgactgtggatggctgtggatggatggatggttgtggatggctgcggatggatgtggatggccgtggatggccatgaatggttgaggatggctatagctgaccgtggatagttgtggatgaatggagatggctgtggatggccatggatggccctttgcgactcaaagtggccctggattagcctgggtggccatatgtggtcctggtgccctccatagtcctgaatgagcctggtggctgtggatggctgtcaaggaccccaggtgtcccttagtgactattggcagtcttgatggctctgggagacactgggtgttcctgggtaaccctagacgacctttgatggccctatttgcatgggctccctaggtagccctgggtgcttctgggtggccgtggatgattctgatggtttcacatgggcctgatagccctggttaaccatgagttgggttgccctgggtcacccagagtaccccctagatggcctcaatgatcctggatgactcttatggatcctgagtggctgtggtggggatggatgaccatatgtggctgggggtgaccttggtgtccctgggggtctctgggtgcataagggtggccctggatactcgccatagctctgggtgaccttgctggctctggatgtctctcagagacaccctgaaagtccttgtgtaggagtgcatggttttggggagtgggcagcttcttctctgtggtcacagtgtgaaatctggtctcaggcctttcacgggccttccctgcatgtttgaagatgctgtctggcatcagggctgtccaggagttgtgggctcagggtaatgtctcccgtgaggggaggtggaagggacacgttgctgatggtggctctgtgctccacctgcgtgggctccatggcctcccccttcccgctaggtgtgggcttcacggtcatcctcatctcactgtatgtcggcttcttctacaacgtcatcatcgcctgggcgctgcactatctcttctcctccttcaccacggagctcccctggatccactgcaacaactcctggaacagccccaactgctcggatgcccatcctggtgactccagtggagacagctcgggcctcaacgacacttttgggaccacacctgctgccgagtactttgagtaagtgggagtcgggtcctcgggaacgggagagatggcgcagccaggtcccccatggtagccccttggttggacaccagcccttgctgactcccagggtgcggggagggggaatctgttcctgcactccatccctttagtgctctggaggggcacatttctgaatcactgtggtggtctccaggagctcagcaaagctcctgtagggcgagccctcagcaaggatggggcactgagcagctcccttggctgctcccagcggcagctcagggtgggagggggctgatggggaacacagcagaccctgtgcagaaggtgggcaagctccagtctctgggagctgcagtggcgcctctggagtgagtcagccccatgtctgggctcccttcctccctacccttcctctgtgcatagcatggggccgaactgcctcactccggcccttgccctctccagaaaagataactttctgggtgtcactgcgcaagaagtctctggcttcagtaggcagcccctgtctccagggtgacccagccgtccgcttttcacaagactttgttttgttgtttacctgcatggctttatttctgtctctgggcctctttccacctcccatgccagcgtatcccatgtccagcagcctcctgggtctctgtctccttctccctttgccctggccaggcctgacctgcacagtcctccccagccaggccagttcctcactgcccaccccagccagtcacaaccctcactgtcccaccccagccaggcaccaaaccacaaagtcccaccccagccagccccctcgctcactgtccacctcggccaggcccacccacaccgtccaccccggccaggcccgcccctcatggtccaccccggccaggcccacccctcaccgtccaccccggccagacccaacccacactgtctaccctggtcaggcccatccctcactatccaccccggccaggcctgatcctcactgtccatcccagccaggcccaacccatacagtccaccccgaccagccccaacccgcacagtccaccccatccaggcccgtccctcactgtccacccaggccaggcccgcccctcaccatccacctgcagcacctgctttcctggaccccgatgtctccgatgaagtccttttgggccccgtgccagctcctgctggccctccctcgtcaccaatggcctggcccagcctggaagggtcgttactgacacccaggggttccctgtttcccctggacccctcccggaatctggatctggcgggtgccatccacatcttcctgccctcgccagccgggcctggggcctcgtgccgggtcgccgttctgacaggcggactcttcgactcagccgtcattttggagaggaggagaggacgtttgcgcgattctccccagatccagtgtttcccgtcagccagggcgctcctgtttggggggctcgcttgcctggttagacgcatcttattcacgtttatatgccaaaatgagtccacttcaaggtaggaaaaggaactttgaccagtaagactaattccagttttaacagccagtaggtgcctttgcaaaatttgttttgagtcagaaaacagggagcttgaaagcaaatgaagcatctcatgttaagtttgtacaagtcacggtgataggaacagccaggcgggaggtgagcagagaagcccccacctcgcctctgctgggggaggatcatccccgagaactttggtcttggtctgcaagggcaccttaggggcgcacagcctcccagagagatgctttctatatctgaaaaccgtatcaacagacaccactgaggtcttttcctgcaaggaagggaccttcgccctctcctgggggtcttgtcagagatggctgagatggagccttcgggcaggccggagggtgtggcttggagaaagttagggctgatgctgccggaaagggaccagttctccatggtgggcaggcgttcggtctctcaaactgctctgcactcagatattcagaacccaagtgcttggttctagaattcctcctcgggcatggaagcatattgccgggactggcctcggaggtgaggagccggggcggaggcaggttttggggggccacccggcgtttttcttagagcatgaggaagaccatgggtcgcgtggggtgagcgttgtgtgggcctttcttgtggtttgggagtggacaagagtgacgaactctgaggaggacggtgccacgatgggagagagtggcccaccaagtacccagcaggaggagagagagtccaggctggggcgccaggaagacgctcatgggaggagggctggtttcagaaggtggggcaggtgggagagaagatgcacccgggatgagtcctggttgtttgcctgaagacacttggacgagcatcgccataggaagcgcagctgcaggcaaggtcgtgggagagtctgggcaggactctcgtgggtgacaggcaagcgggaaatgataaaatcgtccaaataatgcacagtcacaccatttgtccaagtagattttaacattctcgagggagaaaactcccattgcgtgtggatggcctgttcacacctacatttccctaattaaacaccctatgagcaccccaggcctgggctgcatgtgctcttgctgtgtgcccagctctcagggttagcatgtgatcaaagagaggggacagcaggagaaagtggggggcacacagagccaggggcagtggccgcagaggtgccaccagggcaagagcctgagagttcccggtacccaacgccctgttaaagctgccaagtgctgccatgtggggactgccttccttttgtttgggcagtgtgggaaatgttgactcattgaagtgatgttcagataacagaattggagaggaaaacttagtgtagtgattagtccagtgattcgttgttaagaatgctagaaggaaagaacacgtgttattattttaaacgatcagactagcgaagtctatttggaagttctcagtctggaaggaaggaaggaaacagaaggttgcccagcccttcactccagaagccctgtccgcactggcacgtggtacactttagctggcggcagctccaagacagacgtggggagttggagaaggtttaagatcaattcacaaatgattaatgacccaaggcactgaggtgcttggcactcctcccacaccttctgaaggtgattttcccaccagtgggactgaggttcccctgaaacaggccccagtgactcttggggagcagggaggacagtcataacgtactcaggtctgccaggggtgttctggatttcaaacctgctttataaagcagatcactggacaaaggatgtcgggttcctgccagcgcgtgtaatcagggagtggatgtgtcactgtgaaaggccataaaggccagagtggctgtgatgtgtgacagtgcagctctttgtcctagataatgggcatgcctgactttgtcagtaaacacaaaagggattgagtttcctacacaatgtacgaaacatgacgtgtcataaatttgacaactaagatgttagcaagagtagatctgaaagggctttatcgtgcgtttttactacaggtcctcaggaagtaaccgtgaggcctgggtgagacgctggccatgtcttctgggccctaagtcagaaaagatgctgagctgccccactaacggtgcttcctccatgtgccatgaatgccgtgtgcagtgctggctcctacacccagtgttcctcagggttggcaaatgaaacgtatcctgtgggagttgctggcacccctggcccccaggggtcccagccagccttcctgcattgccacttccttcttgggcagcagcccacccaccagagggaggtggcagaaatggttcctggagagaaataaaaggaacccttccttgtaggaacctggagattattgattggctgcatcccacacatttgatatgctgtgttttcatttcaaaaccccaacacaggaccacataactgtgaccagtttacagtttccccacttccataaatacttatcgacactgactaatataaattataaagttataaattaaagctattaatttgcctcaaatggactgcattagctgcatcccacaaagtttgatatgctgtgttttcatttcattcagttcaaagtattccctaatctttcttttgatttctatttgactaacagggcatttttagaagtttgttgtttaatttgaaatatttggaagtttgctaggtatttttgttattgatttctaatttaattctgttttggcaagatgatatgcttatacatctttaatattttaaaatatattgagacttgtttatgacctactagatggtttacactggtgaatgttccacatgcacctagaaagaatatgtattctgctgtctttggttggaaagttgcataaatgtcagagaggttatgttaggtcactgtgtttttccaggttttctacatccttactggttttctgtccacttgctctatcagttactgagaaaggggtactgaaatctcaactataactgtagatttgtctatttcttttcacttctatcagtatttgcttcattcacatattttgaaactctgctatgaagtgcatacatgtttattattattagtctttgaattgaccgctttaccatttgaactatccttctgggttagatttctcattctgaagtctactttgtctngtagtaatatggccaccccaactttcgtatgattactgtttgtgtggtattatcttttccagccttttatttttaaactatatgtgtcattatatataaaatggatttattgtagacaccatcgagttggttgtgctttttatccaatatggcaatctctgttttttaattagagtttccattcaataattgtcagcatggctggctttaagtctttcattgtgctaattttttgccccctctcttctttgtttcttgtttcctctatttattccctgttttgaattaattttttaggctttcattttatcaacactattagctaataaactatagctttctgttttcatttcttcgtggattttatagggtttacaacactgaccttcaagtgacatgataccgtttcacagagcagaagggcctacaacagtagacttctgttttcctcacatcctttgtgcaattgttgtcatagattttttctacaatatgtatcaactccatgataccttgctgttatttctgctttaagcatttacattttaaataaatctaacaaagaaatgttttatatttacctgcataggcaccatctctagtgctgtccagtcctgtatgtaggattggggtttccatttaagaccatcttccttccatctaaagaatttcctttaacatttctcatagcgtagacttgctggcagtgattcagcttgggctttacacaaaagtattttgccttcttggggggctattgtggtaagctatacatagcattgcttttaccaccttagccatttttcagtgcacagttcagtggcattaggtacaatcacatgttgtgcaaccatcaccatcatccattggaactttctcctcctccaaagctgaaactttgtccccattaaatactaagtccccatcctccctcactgcagcccctggcagctaccattctactttctgtctctgtgaatttgtctactctaggtccctcctctgagtagaatcaacttatttttttgtgactgccttattttccttagcatatgtcttcaaggtttattgaagaatttcagaaccagaatttcattcctttttaaggccaaataatatttcaattccattgtatggatatatcatgttttgtttatccatttatctttttcctttttagagacaggatctcactctgttgtccaggctggagtgtgcagtggtatgatcacggctcactgcaggcttgaccttctgggctcaagcaatcctcctgcctcagactcccaagtagctgggactacaggtatgtgacaccacatccagctaattttttaaaattttttgtaaagtggggtcttgccatgttgcccaggcctgtcttaaactcctgggctcaagtaatcctcccgcctcagcctcccagagcactgcaattacaaatgtaagccaccacacctggccagatctatttatcttttgatggacatttgggttgcttccacatttnggctactgtaaaaacatgctgctatgaacctcaatattgagtacctacttttgagtagatacccagaagttgaattgctggagctatgtgataattctgtgtttaatttnnngaggaaccaccacactgtttcccacagtggatgcaaatcggaacaagggttctgatttccccrcatccttgacaacacttactttctgcttgtttgttttgatcatagccatcctaatgggtgtgaagtggtctmtcaytgtatttttgatttgtatttccttaatgattagtgactgttgggcatctcttcatgtgtttattggccatttgtataccatctttggagcaatgtctattcaagtcctttgcccatttttgaattgggctgtcagtttttttgttgttgagttttaggagttctttacatattttagatattattctctttncagattaataggtgatttgcgaatattttctctcattctgtagttttcctttttactctgttgatagcatccttcagtgcmcnaaagtnntaaattttgatgaagtctaattcatcttttgtgtcatatctaagaaaccattgccaagtccaagattgtgaaaatttaccctatgttctctnccaagagttttatggttttagcccttatatttggctcttttatccattttgggntaatttttctatatcatgtgaagtagctgttcactgattttcctctggttgtagatcacatttcttgcttcttgtcatgtctagtaattttttattagatgctagacttggtgagttttatactaatgggtatttagctcttgtcgtcttkgttwagagagtgttagattngttctaataggaagtnaacgtgcttnggcacaattttatcctknggaagcttgtttcaccacctcactgccttggctccctcttggtaaaacggggtgagagggctgctgtgaggtcatcacaatgatgcatgggaggcctgagcatgcctggatcaccaccagtggctccactgtcacccaattgaatcatggccaggaattcaccaggaaaaagagcccagtagaaattgggaggtgctgtgtcttttccacgcctggtgaacatcctgggccaacacttttctggtcctcccaactattatggcttatgaaacacctgcacgtaggcctgcacttatgccccttcccggatgtcctttgatggtctcgcctgccctgccctcagaagcatggacatgctgggagacgcacagctttcccctgctcctggcatggctggttcccatgctgtggtcagctctggggacccctcttctcaggttgacagcactcaggagtgtccggttctctaaattgtctgtgggttttcaaataacctcaaagcacagtgactttctaatctcgagaaggggctcgacccagtgtgtcaaggtgctgcgtctgaagttgctttcatgtttaatgctgagccagctgtgtgtgctgtggacgcaaccttgtgagaaggccctgagtggggcagcgcactttccctgggcctccccctctggtccaggagggcctgtgccatgtrtgggcattgactgagtttgccttttctccaggcacctgggcaaggggagagggtgtgctgtctggtctgggtgtataattcatgcacgtgtgtgtgtgaggcactgaggctgccaaggcgtgggcgggtggcatgctggggtcagtgacaccatgggcagtgagggaggagtggtccgggctgcacaaagttgctgggaggcctcagaagctctcagtgatgagaccttgctgggggagcagaacgacggggactggccagcaggggcagagcctggtgtgtggcaggaggagtgagaagaaggccctgggagtccccactgccccaggaagggcaggcgtgacctccaccagctcagacaactttccctgcacagtgcgggtgacggatagcctcttgactgagcggcttgcccttggagaagagcagagaatggtggcgatggtttcagtggtgcagccatctgcccacccggccaacctggggcctgtgccaacctggggcctctgcctgggcgccctccaggataggacggaggcactgtccagcgctttcagggctcgtggggccttccctgttggcaacagccagggtgtctggagtttgaagagccgaattcctgggacatggccctggaatgccttgcagctggtggaaagctccccaaggctgcattcggccgggctccaccatgggtgtcaggttttatctcctggggacctcagtggacccacaacagaagcaaacctgggcagtgggagctcctttcataacgcggcttctgtctgtcacagctcctgactctacggtggcagcggcacggctgttacagttgtcttggccccaagtcacagtctgcagtggtgacgcagctgactgcatgtagcctggtgcatgttctcccacagagagtgtcaccaggatggaatgagttcccacagacagggggcccaggacctgtgcctggggcaaggagcacagccgatggtcagctccatccctcaccctctgttctgccctttctgagggatccttcaaaaaacagtggaactgcgagtgattcctgctggagcagagtcatccactgaatctgttccttgtggaatcctcatagcagcaggggctgtgagcaggtgtcgtgagccatcccctcagaaaacagtgctggctggtgcctgtgtgcctggcattattgctagagtttgctcggcctcatccctggagagggaccctggggctgtcttgtgggcagcagtgggtacccagcagcgtgggcagcactgtgggcagcggtgggtacccagcaccatgggcagcactgggcagcggtgggtacccagcaccgtgggcagcactgtgggcagcagtgggtacccagcaccatgggcagcaccgtgggcagcggtgggtacccagcaccatgggcagcactgggcagcagtgggtacccagcagcgtgggcagcactgtgggcagcggtgggcacctagcaccgtgggcagcactgggcagcagtgggtacccagcagcgtgggcagcactgtgggcagtggtgggtacccagcaccttgggcagtactgtgggcagtggtgggtacccagcaccttgggcagcactgggcagcagtgggtacccagcagcgtgggcagcactgtgggcagcggtgggyacccagcascgtgggcagcactgtgggcagcggtgggcacccagcaccttgggcagcactgggcagcggtgggcacccagcaccgtgggcagcactgtgggcagtggtgggcacccagcaccatgggcagcactgggcagcggtgggtacccagcaccatgggcagctctgggcagcggtgggcacccagcaccatgggcagcactgggcagcggtgggtacccagcagcgtgggcagcactgtgggcagcggtgggcacccagcagcgtgggcagcactgtgggcagcggtgggcacccagcagcgtgggcagcactgtgggcagcggtgggcacccagcagcgtgggcagcactgtgggcagcggtgggtacccagcagcgtgggcagcaccgtgggcagcggtgggcacccagcaccttgggcagcactgggcagtggtgggcacccagcattgctcagcaacttccttttggtttctgtggctccttttcttcaaagacccaaggtgccctccgcctccgcagctccagtgagcaggggtgccaagggcagatggtgaggcagggcttcctgggcctcccacgtgctccacgggtttcaagggcggccctgacacctctgccagggcctgtgggccagacctccctggaaggcatctcttgtccatcagactggatgctttctgccctgctgagatggggagggcaggtccccggacaagctcagccgtccagttccaggtgggttgacagccacccacagagtcccccgctgactcccctctgcagacgtggcgtgctgcacctccaccagagccatggcatcgacgacctggggcctccgcggtggcagctcacagcctgcctggtgctggtcatcgtgctgctctacttcagcctctggaagggcgtgaagacctcagggaaggtgaggctcgggggtcaccaattgggcctgtagacatggggccaccaagtggacatgtggccgtggctggacaggaggtgcacgtgtggcctcagttgggttttgtgctaccaatgtggccatggccaggttggggtggacacatggccatggttgagtttgggagactcatatggccataatcaggttgggagtgtacacgtggccatgattgagggtacacctgtggctgtgccgggttggcttgggtagacgcgcggccatgggtgggtggggggacacgtggccgtggctgggctgggcggacacacggcacagttgggttttgggtccacgtgtggctgtgtttggggaagggcctcaggagggaagcactcacagcagtgtttctggcaggaaggcacacacaagatgatttttttgttgataaaaatactttgggaggctgagacgggcagatcacctgaggtcaggggttcaagaacagcctggccaacatgatgaaaccccatctctactaaaaatacgaaattagccaggcacggtggcacgtgcctataatcccagctacgtgggaggctgaggcaggagaattgcttgaacccaggaggcggaggttgcagtgagccaagatcatgccactgcactccagcctgggcaaaaagagcaaaactccatctcaaaaaaaaaaaaaaaactttggttgttatatgggccaaaaccagttttgaccaagatacgactcctcccttggaaaagtgcgtgtagtatggcaccagccacgggagcctcccgcagggacacagcccagagcagcccttcatcgtgccacagtgccgttcaccagtgtgaatccactcacgtcccacgcatcagaaaacccccatcagccactcccagctactctggcggaccgaatgcagaaaaggaatgtgctttccctgccaagttgttcttccctttccatccctggggagggtgtgcaggacagaaagtgtctgaccttctcactccaaggagcatttgctgagctggcgtcccaggaaatgtttgggaattgggcctcccaatcagaggacaagccgtcagggcaacccggtgcccttgtgccagtgtctgctcccaccaagggccctgcctgtgcagcctggtgacactgtcctctcctgcaggtggtatggatcacagccaccatgccatacgtggtcctcactgccctgctcctgcgtggggtcaccctccctggagccatagacggcatcagagcatacctgagcgttgacttctaccggctctgcgaggcgtctgtgagtacagtctgctcactgcttcacagtccacaggggctctggcattcccaggtttccatatgcattgcctgccagggctgagaggtgtcagagttgcagacaccagggttctttcctcgggaagccaaatcccaagtacctgtgatacagcacgagtcatctaaatcaaattacatcagaaactccatctagactcaggctgcagctttggtcagcaaaagaagacataattcagggttaaaatatttggagaaagcctcccggagagaggagactcagctgggccatgggggatgggacccttgtccagaaagggaggagaaagggctgcacccttcctggcaaacaggcccagaaacagaagcagctgttggcggaaggctggcatgacaaaaatggcagctcccttgggtcatcgttggaaatcaggtggactaagtgggggaggtggcaggccccaaagccgcccaggggcatccatgttgctgtgggaggacaatgcagcaagaggggaagggccatctcagctggggtatgaggcaggaggccgttgagaggtgctgccctgtgtgggtgggccggtggagccaggtctgggggtcatgaggcaagtgtaaacccaagvcagaagtgggaaggaaggggagaagggatgggcgggcatgtctgcaagcctcccaggaagccccagggaggcagcagctgacaggtgcagtgagagagggcacctggacatggcacctatgaggctgcaaaccagttgggtgggggtgggggtggaagtgtgcctgcagcactgaaggggaagccctgtggagacaggagccatgggtgcagcaggcgtgtggtccacgggagccaaggaagagagaggaggacaaccagggcagcaaaatcagctgtggccgggggcccacaagtgcagagctggagccagacaaaccatgaagtcagcagggcgtctggaccccagaaaggccaaaatgaagccaaggggtgtgtttgcaggaccatcgcatgttacagaatcaaagaaaaataccacaaggacaacgtngagcctagtgctccagctaggaagaataggcagccccaggaggaggcaaaacaaacaccagtgcatgtgaaaagatgctcactggagaacaaattacaaagatgagatgtcagaaattaggtggagacagtgaatagattggatggatggatggatggatggatggatggatggatgaatgctaggtaagtaggtggataggatggatggatgataggtrgctrgatagcatggatggatggatcgatgatggatgggtggatggatggatgatggatgggtggatggatggatgataggtaggtagataggatggatatacaataggatggatggagatagatacatacacacacatgtacttcatatattcatagatgatagacagttgatagattatagagatgacagatagatgatagattggtgatggattgatagatgacagtgatagatgatagatagatagatgattgattgatagataatagatgatggattgatgtatagtgaagagaaatcaggaaagaaatggaaggaaaggacaattgcaggtcctggagtgaaagtgcatgaggtgaggcccagggaggcagccatgggcactggctctggtgtggcactgggcagaggcctgagctgcacacacagatcagggtgaggaggaggcaggcgctcccctgtgacacctgatccagcctgcagcnacctgnccagacaggtgactgatgaccaacatgggagccacatcagggtatgagcctctccanccnctgcccacccagccactctcggcttggctcctcccctcatgctgaaacactggccacctgcagagtcctgactgcggggcctggccatctgcctccaaacacactgtcccaggaactggggttgccttgagactctgacatgctgcccaaaggacagagggccccgccccctctgcagcacccagttcccttgctcagtcaagctcaggcaagcttgacctgggacctgggatgccctgagacccacctggcctccccagcaggagcatctggtgtctctgcctcagcatcctggcccacaggcctgtaccatgggctccagggacttgcaggaacagccctaactgaccagtccctcaaatgcctccaagggggggttggctgctccttctcccccatccaaggcccagggaagggcaaggtgggcatctgagtcactgaatggtctccgcagtgccctcaccttagcaggttgtggctgactttttaaaataccacaatggtccaatcgtggacccacccacctttcctttcacgtccagagttgtgggtgccatccaccgagttgggcaggcacagcaccagtgtctaagctgcaggtgggctcctggccatgcccaggtgccactgtgcacctgtactgctcatgttttgggaaggatacaaagcaggcattggtggtgtgcgtccaatcaggacaccatcatcatgtagcatgtggatgggtccatgcctttctgagggttatcagggtgctgccatcatgcagcatgtggatgatccatgctgttctgagggttgtcagggcgccaccatcatgtagcctcaggatgagtttatgttgttctgagggttatcagggtgccgccatcatgcagcttgtggatgatccatgatgttctgagggttatcaggaagccgccatcatgtagcctgtggttgagtctgtgctgttctgagggtttcagggcactgccatcatgcagcagggcgcacatgggatggggggacacactcagggggttgtgacgctggaccctgatcaagggaggatggagaccccgctagggctggtgtgagtgtggataagtccatgctgnactgagggttatcagggcgccgcggtcatgttgtgtntggatgagttcatgacttactgagggttatcagggtgccaccattatgcagcatgtggatgaatctgtgctgctccgagggttgttaggacgctgcggccatgtcatgtgtggatgaggccgtgctgttccgagggctattaggacgctgcggtcatgttgtgtgtggatgagtccgtgctcttctgagggctattaggacgctgcggtcatgttgtgtgtggatgagtccgtgctgttccgagggctattaggacgctgcggtcatgccgtgtgtggatgagtccgtgctgttctgagggctattaggacgctgaggtcatgctgtgtgtgggtgagtccgtgctgttctaagggttattaggacactgtggtcatgttttgtgtagatgaggccgtgctgttccgagggttattaggatgctgtggtcatgccgtgtgtggatgagtccatgctgttctgagggctatggagcagggcacctctggttctgtggaatcgctgccttgatactccatggggaatcccagatcaatgaacacagacagccccctgcttctcaggctcttccaggccgctggcccgggagggttcacttcctgaggctgcatcttccaccagtcgtctgctgccatttacttcttgaggatggtgttgagtttagaggcctcagtgtggggctgggacaggaagggtgctcaggtcctttgcctgtggcctgcgttctcctgggacagcctctcaccgccctctggctctgcaggtttggattgacgcggccacccaggtgtgcttctccctgggcgtggggttcggggtgctgatcgccttctccagctacaacaagttcaccaacaactgctacaggtgagcccctagcagggccaggcaggggcctcatcaatactagggagaggtcgctgacttccagaaatagggtgtccctggatgagaacagggcggatccactgaacccgcaaacctgtgagctgcgtggcctttcagacagaagcgacagcgaggcagctcccaacacgattttgatttcaactttaaagaaggcactgaagccagtgggtgtgtcgcctcctgggagggacctgcctaggtttgacctgcggccagattccccactgagggccccaagtggcaaggccagcccctccctccacaaggacacaccctcttccctcacaccagccccggggggtctctgtcctccctcgctcagggtccagcttcacaaccccctgagtgtgtccccccatcccatatgcaccccgtgttacttactggcaggcacctgaagccccgtgccggaccccaaatccttctaaaaacagaaacagaattttatccgggatctgcttgctttgacctttatggacttgtgcttactttctttcacatcatgaggctagaaacacggtaaaaatacaaggacagtgtgtgcagcagaatggccaggcagaccacaagcaggcttcactgagagtgggcgctggaaggcaggtcctgaggcagcgcctgcccgcagcccacctgcgtccacctgggtccaggtgctctgcagatgaagtgtgtggtccttccaccccagtgacaggacacacaggaacccaggaggaggacgctggtgccctgaccgaccccaggaccctccctcttcgtccttcgcttggctccagctctctggtttctcagccctcagagtggagcccccaggcccgcagcaccagcgcccttgggagttcatgggaaacacagcccccgagaccccatgagacccgcccagtcaggatctgcatcttagcgaggtccccgggaggtgtgtgctcctagagcttctggaagatctgccctgggtgaggtgtccacagcaagactcgcggggcacaggggtgcccgtctgttctgcccaccctgagccttgatggctgagccttgagcagctcagctaggggaccaaggtggcccaaggacagctctgccaggctgctaaggagctggccgtgctcactgggaaaagtagcccctccgaagacctcccgcccccttccccagacacagtaaattaagaataatgactggaaaattgcagctgctgcagctcagctggttcctgagacggcgtgtcttgttcttacagggacgcgattgtcaccacctccatcaactccctgacgagcttctcctccggcttcgtcgtcttctccttcctggggtacatggcacagaagcacagtgtgcccatcggggacgtggccaaggacggtgagcccctcctgctgcacctgggcctgctccgtgtagcaccagcgccgagctctcagcaaagcctttttccttgtgaaagaggaaggagacgcatgggccctgagcgacttcagtgagagttgctgcctcactcttgaaggatggtggtacacatcccagtacagacctgcccccacccagcgccttccccgccctgcccctccmggcccccccacccagtgcctttcctgccttgtgcctctcggggcctccaccctgggctggggaacctcaagcccaaatgcagctgagcagcatagttggtgcctcagtccctcgactgctccctgcagatgccacatgaggctgccccaccagggtctggcgtagatgctgtcactgagggccctctagatgtttgcttgccacgcggtgtgggaacatgcagctcagggaaggggaggaatgagctgttccagcaacacctggaggcaggctgggatgccgcaaacatcagcttggccacagagcagccgggagatccctgaggcctccagcacagggtgtccctgcccgctccccaggccgacgcatgacgctgagtgtccctgcacgcctggagttgtctccgagagggtggggaggggtccaggtctcgggcaggcacaggtgagtggtggggggaggccttggccacagcaagaagtgtgccaggcaggatggagccggcaggacgggcacagatgcaggggctgagagtgggcccaggcacttggggccacgtgcctggctccggtgcttgcagtggaaagctgtggcgttggcagccctaacttgggccaaccgagagctccagggagtcccaaggcttctcggtctctgtcagccagcagagcccccgcctgcctcccggcctgctctgccacatggatgtggaggaggccctttcgctccagacacgggcctgggttgggtgggctcccatgctgcgtccccatccttgcttcctctggactgtcttctccgggggtggggtgggggcactacatttgtgaggaatgattgtgctcagaaaagcccctgtcccgtgtgggtgtcgttgctgactgatctctgcctgggtgttgaggctcagtgaaggcggggagcgacaagcaccaagcgggggcagccttgaccgcacctgagtctcacagagtggggcactaggaccctcgcaccgcaggtaggaacacgctcagagacctgaaagggcccactccatgcttgcaacagaaagccagggtcggggctggagccacagctcagaggtgggcctcctaagcccatgttctttccactaggaaaaaaaattcagtcaaagcgggagaaagggaacatctgcaaataaatgcagagcagtgaaatttactcggtgccgcatttatgccttttcttcattctttttgccctttattatgataacgagcatagtttgcaaaaacctctattaacccctgaaaataaagttgaatgttcttctgtgcatttcatgacaagcaaagtaaatgtcatttacagccttaattctcaagaaaatagggtgaaatgttaacttaggtacagaaacgaaggcacgggtgttgacattacattccctgagctgatgaatatcttcccaggctcctggctggtaccatctaagccccggaacatctcaggcgagcctgcctcccccaccccacgcggaggctgtccccatccaccagggtatctgggagctgcgagagcccaggtctgaccccgctgcttggctgatagtgaggcccctgaaagacctttaggaacggcccctggctctggcctttgattatttaaaaggccaggcgcaggcctattcctgcaggctagggccagacacgtgcctgctgaggacagggggactctgttgcaggcagattgggcttgggagatggtgccagccagtggaggatgcaaggcttctgaaatggtcaaaggtcaattgcctatgggactggtttttactttggggtcatcagagaccaaactgcgttgacttttggtcgcctgcctgccacactctcgtcccctccacctccatccaagtctgcctgctggtagcaggaagcacgtgtcgtttcccgagagagctgtgggggaacacctcctccgcctttgccatgccgccctcagcctggcgtgcccctcgcttggcaagggatagcaaaggtagcaggtttgtctcttatctccgaagccaccatctgggcccctgtatccatcaggatgtgctgttcctctgagccctcagggccccagctgacaggagcctgtctcaatatggcctgcgggaccccgtggcaggggaggtggtgaaggagccacacactcctctaccaagcttcactcgcagggacccgctcactgtgggttcacagcacattggccaagtgcagccacgtctaacctcacgggagggtgggaggacctcagcttcctcatgtgcctggaaggcggaggtcaggaatgtatccctaaatgttttgctaattttagaaattaggctactaaatagtgtggacgtgtgtgatttgtgtgtgtttgtgtgtgtatgtttgtgcatgcaacgtgcatgtttctgtttgtgtgcgtgcatgtggatgtgttcttgcatgtatgagtttgaatgcacaaatgagtgttcgtgcatgtgcgcgcatgtgtctgtgtgtgtatattgcatggtatgtgtgtctgagtgtgtatgttgcatggtatgtgtgtctgagtgtgtatgttgcatggtatgtgtgtctgagtgtgtatgttgcatggtatgtgtgtctgagtgtgtatgttgcatggtatgtgtgtctgagtgtgtatgttgcatggtatgtgcaggaaaaactaactcgaaggacattagcagatgtccctgggatgaagggcaggaccagcctggaagcccctcctgctcctccttgtttctgccccttccttccccaagcacccccatagcccaaaaggacccaggtaatttggaggagccccattgctgggtggtgggcatgaaccaaagccctctgatcagttctgggtttccgctttcctgagtcccaggcctggtctgctggacatatagaagggggcttttcagcagagccgcaccagccctagtctctacaggcctgtggcaggccatgcttctcggggcggggtggggcaggatgggcgggagagcacagcgtgggctctgtggcaagcagggcgggttctgtttcagggccagggctgatcttcatcatctacccggaagccatcgccacgctccctctgtcctcagcctgggccgtggtcttcttcatcatgctgctcaccctgggtatcgacagcgccgtgagtaacccgcaccgcccggccctgtcctcggcagttgggttccttccacccgagggggccctgccctcccagggctaggcaagatccctgggctcacggacggcccccagacctcctgtccttgacttgggcgagccccgtgattatttgggagacctttctcggggctggagtgagtggtgactggagtttacctttccctttatccccctactctggggtacctgtgtgccctgccctgagccacctacagatcctggaaatgtgcacacacatgcacacacacacatacacgcacacacatacacacatacacgaacacacacattcacaccaccatgcacatgcatgcacacacatacacacatgcacacacgcacacatacatgaacacacacgaacacacacatgcacacacgcatgcacacacacatacacacagacatgcatgcacgtgtagcagggccccagccaccaaagacttggctccggacaccagagtggtggggccttggagggcacacagcaggtccttcatatctcgtggctttccctggaagcctcagctaccccatgaggaatgaggagggcaacagaagttcctggcacctaccaatcccaggcctggccctgaatgctttgtgtgtggcccctgcacctccagctgctgggggtggcgggtccagcccttgatcggccctgggcctgctggactttctcaggctccttcttccctgtcagctgcttgggaccaaagaacccagaatcccttgccttataaacgctggtcatgcacccggccccccactcatatcctatccacctcgtccacggctcctgggttgaccacaggcctcatgttcctgacatgagagcatgaaggggggtctggaccgagcaaggtgaagaaggtcactaagcaggagtcaggtgcctggacggtgtcccacaggaggatgccaggagtcaggaggctccgtcgggaaggcgtagccaatgacaaggccaggtgcagctgaaagctttgtgtgggggacgcatcttgctcaggaaaatctggccaagctgagcccgtgcagcagcagtggacagggtggcattgttttagccatgccgcatcttacccacccagagacatcgaagaggctgcaaacccccyaccgtggatacagtggtccctctgggtcctctctcctgcggtcgtgccgccatagaagccctcgccaacagctgtcctcactaccaggcatcctgcaccctggacggccatgtggcccctgttccgtgtccatccccgggtgtgcgtccactgggtgacaagtaggtcttggcccaggctgcggtcaggagcgccgccagcctgcagcccgaccctgtgctctgtgtgcagatgggtggtatggagtcagtgatcaccgggctcatcgatgagttccagctgctgcacagacaccgtgagctcttcacgctcttcatcgtcctggcgaccttcctcctgtccctgttctgcgtcaccaacgtacgtaccatcgccggcttcgccttctcctggtcatgtctccttagcacgtggcacggggcgccctggctgggactgtcaggccagacagaaccgcagcacttccagggagctgcaaacccacccaccccagaaaatgactcgtagcagtgcacagggtaactgcacatccagagcttggtcccagagtcacttcagcacctggacagctcccccagaagcaccccaggctgaagctgcctccttctagggtttggggactgggggacgctgggggtgtggtggcagagcctatctatgtgggagggggagcccaggccactccctctccaagggaggcactgccaagttccgcattcggttgcttccatttctaattgcacatgaagccctaggaagggaaaggagaggtcatttttatttttattttttgtaatacacgtggccctaagaagctgcatgtgggttgaattttagggactcaaaccagagttttgcagtgagtgaaacaatttgtgtgcacagtgaatccccaggctgggtttacctctggggaaagcccttctgtaggtccacaggctcccctctcttccagggtggcatctacgtcttcacgctcctggaccattttgcagccggcacgtccatcctctttggagtgctcatcgaagccatcggagtggcctggttctatggtgagtccggggggaggcagccaagccggcaccctcttgtttggtggctgtgccactccccttctgaaaaaggctccgtgaggaaacacctttcagctgcaggaagcctgggttgtggtcatcacagctccgcagaggggagaggcttggcactggtccctttgatgggatcagtgaggtgcttagcttggatggcagccagaagaggcacactgtggtcagaggtgttcacagcggctgggcgtcttctgcctcctccacgctagaggcaccggtgagcccatcccacccaggggaacacaatcagatccatgctggggtttcagcagggatgtgacatggtgcctttcaaaggtgccgtcatcgccttccctgctgaccagagctccagagcagtcgggacctgatgatcagcgggcggcgctcgaacggggtgcagctcctggcccattgtgctgccccagctgtgtcctgggacttccaccagtggtttaaacagcaacagaaaacccagcctggagccagggctgccctttccccacatgctgacctggccaagtcacctcgactccccttagttctctcttctgtaaaatgggcaggagtgccagctccgcttacctggccagctcacttccagggaagtggcgaggccgagccagggcatctcgccatgaatgtgtggtccgggcgcggtgactcacgcctgtaatcccagcactttgggaggccgaggtgggcagatcacgagatcaagagatcaagaccatcctggccaacatggtaaaaccccatctttactaaaaaaaaaaaaaaaaaaattagccgggtgtggtggcacaaggctataatcccagctagtcaggaggctgtagattttctgaagacactgatggtatacttacgatggaatatgattcagcttgaacccggaaggcggaggttgcagtcacccgagattgcaccactgcactccagcctgggcaacagagtgagactccgtctcaaaaaagaaaaaaaaaaatgtgtggatccggctgaaagctgaatgtctgtggtgctgcgtgagccccggttttggaggacgcccagctcacctgcaaacaagggggtcattttctctgcctcagagccatggaatttatagccagataaacgccctgactttgagacaaataggacaaatagctcctattctgagaacattgttttcagtgttgctctacagaaaacggaaatatcaacctcgtactttcacgggtgtctggaatcaatactttgtctatcactttcattgtcatcttccctgaacaaaacatagaccttcacagaggaagggagaaagtgccttgaattgccatggcctccggaaccacgggagatggggagaagccggccctggcgacctgcacctcagaagaccgagatctgtgttatttttccaaagagaaatccacgcccctctcatctaaatgaaacaaaacctgtgctctaataagatgtgccggaatacgccgggcttccagcacgctgcggtcctgtaggtcttggagctgatgactcctgctccgggcaggggccctggggacctgctggtgggaggcagggtctggggggccggaggggccttgggggacgccccttcttggcttctttccggcctcaacctctctgatcccccgctgcctcccaacgtccatctctcatgttcaggagctcggatgccgggtgggtgtgaagaggggattctgtgtggaggcttctttctgatgggacacgggacaaccgcaagacttgccccaaatctcagcagatcagccgcggtcacacgagtcacagaccaggccagatgtggggggagaaaccactcttaaggtcttagggtcagttcctagaagaagttagataataccagtgaaagaaaaatatgcatttctaaagtggactgctggtacttgcttttggggagaaaaaatgtttattatgtttctagaaatagcttttctgaagacacagtgacggtatactcatgacggaatatgattcggccttaaaacaaaagggaatgctgatgtgggccgcagcttaggtggcctcagggacactctacagggagtaaaccagttgcagaggccccgtgccacgtgactccactgacgggaggttcccacaggagtcacattcattgagacaaaaagcagatggtgctggggcctggcgggggttgggggtcgggaggagttggcgtttcatgagggcagaatttcattttggaggatggagttctgaagatggacggtggtgacggttacacagtatgtgaatgtattgatacattatgaactctacacgtaaaaatggctaaaatggtaagttttatgttatgtgtattttaccataatctttttaagtgaacaagaagtaccagcagcagagggagacagggagagccatgggatggggaggaggacccgaggggctgttgcyggggcgcggggagcacccaccggggcacggctcttcctggtgcatctccagggtggagcaggcacgtgggctcccacccgtcagcgaggcacccagtgggctggggtgtggcctggcctcctctgcaggaggctgggtgcagccgaagcctggggccggtaggtggggcccttgggagtcagcgaggacccccacacgtgtccagcatcgggggartgcgctgccctgatggacactgatgccacctcttctccctcaggtgttgggcagttcagcgacgacatccagcagatgaccgggcagcggcccagcctgtactggcggctgtgctggaagctggtcagcccctgctttctcctggtaagggacctcgggccacctgcccttcccccgtctgcccactgcccccactctggcacctgccccgaggtccagcgcccgcatgtgggttgtcactgtggctggagtcaggggcctcaagactcggcccagaaggacaggctgatccctgaactcatctatagtctccttaaggtggcttccaccctcccctctagacccaccgaaaaaacctcacatggtcttggacccctgtcacagtccgttgtgagttcctgcactttgggccgcgcctctgtgttgggaggggaagctggaggtgagtcgggctgtccactcacctctgcctgtgaggatcaaggtcgaagttagagcttccggggcagtggggacaaaggatgccgagtgctggatgagagcagcaggggcctcggccctgtcccgttgctcacgcaagcctccctctggctcagcagcatcactgtgtccagtaggcacttgcttctgtcatccgccaccgagtcagggcccaccgggcaaggccgtcggacgctggtgtttgtaaatagagttttgttggaaggtggccgcacactttcattagggattgcctgcagtgcttcccccactgaaccacagaggcctggaggctcacaaagcaaagctgtgctgcctgatctgggcaggcaacctaagaactgtccaagtctaagcagagtgtcccgtgagctgctcacgtagagaagcacctcccgagtccagcaggcacgaggtggggactggaacagggcaggggactcaggccgcaccctctcatggaccaagggctggtcccggagtcagcagggcccgcgtgcgtggagacccctcgtcacctgcacacagcaggtgggacagccccgtagttgccagcagaggggttccggggtacaggaaagagatgagagacaggccctatcccggaggagctcaacatagtgtgagagaacctgcccagcatcttgtagaaattccaccgtgtctgagctccaggccgcgtggtgttggctgcacgtaagtgttccaagtccagttaactgcgcttgtgaaggctcccgttgaaggttcctggattcgtggggcgggcttttaatagcacacagactacatggctgttcagaggggaaagttgaggaagccctcccagaaagtcagcctcctgcccacctcccgctctcccccgccattagttgaaactgagctgttttgcatgaggacgttggctccccttgagggggtgtctcctcttaacacccagagggctgacctcgatcttaggagataaaatattctactgatcttagactaaatcttcgaacttcatacagaaacacacttcgtagacttttagataaaactacaaactatacgaaacaggacttcattttgccaagtttgagagaaacatgacaatttcattgctctatgtcattttgttatttaatatgacagccacaattccctatgaagttctgatttcagcagaaacataacgtctgtgttatcatctgtttcttcaggctgcggcatagtcccctgccctctggcgtgtgctaacctctggtcgtaaggggtgtacacgccccagtctcgttcagatgactctgtggcagatgatgccacagcactgctaaagggaaattatgccggagcaaaggcaacttacatgggcagactgtggcctggggaggcatagttctttctaagaaaggtggtatctagcaagaagttgaacaataacagagagcacattacagcaatacctccatgtcagataggcaagcccgacatgtccagggatgcacgcgtggctctttaaagcatgctcagggctctctgtgcagccaaggcagccgcccctgatcccagatgctgcaggccactggctttgctcgccaaagtgctactcaccctggctctggtcacgtgacagacacaaccccagcccccatcccagtcctccgctagccggctccaaacctacaagtggcccgaagtagcgcatgaagaagatgctgagactggcatgagacacgcgtccaacatgcttttcaggtgggaggcttggatgttttaacttttctgaaattgaggaaaagtggacaattgggaaaaaattgcattttaagctacatcataaaccatatctatcagagcttcacttgtgtccttgggaaggacccaggtacacagaacacatatgtaggcgtgcagtacacatgtgggtgcacagaacacattcaggtgtgaggtgcatatgtaggcacatggaggatctttttagatggtggtgcatgtttgtggagtggatgaacaaatgcatgagctgcctcaggagaagcctctggagagtgggaagcttcccctccaagtggcatccaccccaccttctgttactttgtggtggtggttctgagacaggtctgtgactttatcagatttgcttctagaatgagtagagatacggagctcaggatggccctagggtggtcccgcatgggtcacagttgtgtcttcaggccatggatgatcatagattcagtgtactgggtggtggtcagttttgtttttgttgtgatttcaagcaaggaatagaacaaggtgggatacagcaggaagggatgggatgggatgagatgggatgggatagagccggatgtgatgtaatagaacaggatgggatggaatagaacatgatgggatgggatgggaggggaggggagagaacaggataggacaggacaggctagatcatgcttcaggaggacatggcttgcccgggatgcccagctgccatgtctgcaggcctggccggggtctgcacctgcacagctgtgggggctgagagacgctctgccatgaagtgcctgcccgctccctgctttgtcctggcaccgccggctgagagctgcctgacctccgtatctgctggttgcagttcgtggtcgtggtcagcattgtgaccttcagacccccccactacggagcctacatcttccccgactgggccaacgcgctgggctgggtcatcgccacatyctccatggccatggtgcccatctatgcggcctacaagttctgcagcctgcctgggtcctttcgagaggtgggtatttggacggggcgccttcacccgagtgtgaggccaccagaaaggctccgtgggtgtccatggccccagtcctcacctgcctgggtcatctgtgaccaagaggaggagactggaggtggccaccacaacactgtgtgtgtgtgtgcgtgtgtgtgtccacctgcacgcccgggcccatgggtgtgcgtccatatgtgtattcatgtgtgtgtctttaagtatgtccacatgtctgtgtgtgtctgtgtgtgcatgtgtctgtgtgtgcttgtgcctgtgtgtacatccactgtatctctgtgtctgtatgtgctgtctccgtgtgcacgtgtgtgtgggcctgggtctgtgctcacattcgtgtccaagtgtttgtgtgtactgagtgcatgcatgcctacacactatggtatgtggtgtggtggacacagaagccatctgagggcggtagaatctaggggtgatctaggtccccccaggggcgagcccaactttggctgaacagggggagctggagccccaggcagtggaggaagctttgcggagtcactgatatgcatctcctttcttctgcttggttttgccgcctttgtgtagaagaaaggcaggtggaccagtcacagggccctgtttaacaccctggctctgtggttccaggaagagacaaggacactccctccttggaagagggccgccctcacctgagatcccaccactgggaactcccggaagctgcttcctcaaatcccagcctttctcagaaagaatcgcttggccctgggcatcaaaaccccagagcagcaccagctgtgttcaaggattccaccttagggccacacggtgtcccctgggctccagacatgtggcagatgctctcaggctggcactgagccagtctctccagcagcctggccaggccaaggcccagtgcaggcaaagcacagtgtgtggctgggggcttctgtggagtgggaggagctctggggctgccatggccccaggaaagctgatggcaccctgctgtggacagtccctctcagacccccacgggctgacctgccaggacccagcacaggggaagagcaggcagccgggcagtctctgcagggagagagctcctctgggaggctggatggacgtgggaggcggggcccaggtcagcgcagagctggaggatgcctacagcccggcggacctgaacagccagcgcccttacccctcgcatggccaaactctgaacgtaagccaagtaaaacctcagcagctgagccaggtacaagtggaattgtggtgatgacgtggggtggggccacgcacaggggtccctgtgagaggtcacctggcctcagagatccagatacaggcatccaggcccgagagggtgagctcctgaagatgctgcctgctctgggaggacttggtgctgtccaggccccaggagctgccgcagcgggcagtggaaggaaggcacgttcagcgttcactctcccaagagctgcaggtgacaaaaagcaagtgctcccggaatatgtcagctgcaggtggccccgaggctgcccacctgggtgtgggcactttcttactcagagcccagcacacgtggtagcttagactcaagagccatctccaggaccacgttttattttcaagcgagtgctcaaatgctgatgttctgctctgcgctagactttaaggggaccgtcaggatgttggcttcgggcctgactggctgtctggtcggcatgggcactggcagtgtaagtcagtggtgggcgctggtgatatggatgccagcgggtgggcattggcaggtgaggagggctggtggtgagggtgctggtaggtgagggtcctggcagtgtgagtcagtggtgggtgctggcagtgggtactggtctgcactgacccctgcactctctttctctttcagaaactggcctacgccattgcacccgagaaggaccgtgagctggtggacagaggggaggtgcgccagttcacggtgaggtcgaggtccctgctgggcctctctcgggggaattcagaatgatcccaagctcagtgttcttagcccccagggggctccgaggctggtgtagatggtgctcatttactcagccagcatgtgctctatgaggacaggcagccagtggtggcaggtgacagtggagacgtgtgcccgggacggggggcacatgacgcaggggccctgggaggtgcggctgcacagacgcctgaggaaagcatggtccctgcaaagacctgggcatgtcccagaccacgggagcagtgccctgtggggccagctgagccaggttaaggaccagcaagggaccaccaccccccgcctcacgggggcacaagggacagtgccaggaggggaggcctgggcctggccatgggaagccacagggagccctggaggggctgggagaggcctgggagcctggggctggcttcgagtgagaggatggtcacgccaggtgtttcctgcaccctgggagccatccagctgtgtgcgaacatgttcatgacatgccgtggagcaggtgcattcccgggggcacacagtaaacacttgacgtgtttttactcccacaaccctaagaggcagcccagcactctctctacaccagggtccctgagacccagagaggccccggaatgtgcccaagatcacagagctggccagcaggagaggagcctgggctgtgccctgggcctgtggcactgtcctcctccaccccagagtggcctcagccccgacctgattccatacactaatgtcagcctaatgccgacagcagagtccaatgcacagcaaaagggagagaaggccatagtgtggagggcaccgcggccccacctcggacctgcctcttccctctggccacctctctgtggctggttctcgtaaacagtcctcccagcaggggtctcatgagctcatgcctgaggagcccagcatggacctgcacatggggcaggagcaaggatacaggcagagggagggggctctgcgtgcctgggaggtgggtggtgacgtcaggcaggacaagacgctgagcagggaacaggccgggaggcagtggggagaagccgcctctgagcacacatctgcacagcttgttcctcctacctgcaagtcaggttctggtgtgggctctgcctccctccgttggcaccctttcctctgtcctcccagtgacttgcctgctccaaacacagggggcgtgtccaggcatcccatcccatccatccagaggatgccagcccctccccactgggcctccggtcctgctccaccagagcctctctcctctgagagtcctatacctgggggtctnacacttggtacaggatcttgctagtctcctcaaatatccaacttggacttcatgtgagattcttgctgtgctncctgtcacattaatctcagctcctgtatttatcatttctncctctctttttcttggatctactctgttgtagttttgctaactttttaatttggactttaggttattaattggcatccttcgttcttttctaatgtaagcactcaaggctatgaatttccctcaaaaatactccatgtgctacattccgtattttttccatagtatttttctttatcttttagttctaagtatattttaatttccattgtgactttgtcaactcataacttgcttaaaagtctgcttttaaattgccaaatatatggggatgttttactcatctttttgtttttaatttccaaattaatttcattgttctcaaacacatatgatacctattatttaaaatgtattgagacttctttagggccttatacctgatcaactttgataaacgccgcacatcttttagatgaatgtgctattctctaattgccaatacacagttctgcttctgtccatttgagtagggttatatattatgttacccacattgtctacactttgccaactttaggggtgcttgaccatgagtaattgagagatgcctgtggcatattcttcctcgatagtatatttgtttgctgttcccctcagttctatcaggttttgctctctgtagtctgaggctgttttctgaggttgatccatgtccagaatgatcatctcttcctggtgacatgaacccatcttcactccctaatgatgcttttggtcttaaagtctgacttgtctgggacaaatatagttgcaccaaggtgtcttttgagtttgcctgaaatatcttttgcaatctgttaactttcaactttgcagtaaccttaagatttaagtgtcttttgcaaacccagcatacacctagaattttttacgctgacagttggacaggttaatccatttacatttgttgtgattattgatatatttgaacttgattctactatctttctattccatttgtcccatttttagtgtttttctcctttattgcctttttatagattgatttttcttggttcactcatttttattattccgtttatttctctctacttgcttagaacttacatactttattctttttttttttttttttgaggtggagtcttgctctgtcacccaggctggagtgcagtggcatgatctctgctcactgcaacctccacctcccaggttcaagcaattgtcctgcctcagcctctcaagtggctgggattacaggtgcccagcaccacacctggataatttttgtgtttttagtagagacagggtttgaccatgttggccaggctggtctcgaactcctgatctcaagtgatctgcccacctctgcctcccagagtgctgggattacagccgtaagccactgtgcccggacttattctattcctttaatagctactcttgaggttgtaccatacatatttcacttaaactctacagagaaaccatattttaaccccatcccattataaggacttaaatcttcctcctactgatgaacatgctatgattgttcaaatctatttctctctttttaacccacaaataagacactgtcattgttcttgttcctgttacaaatttgnacggactcatcatgttccttggactaatgtgcatgcttggtgtttgttggttcccaaacttttgttatagacgtcttttcttctaggaccattttcttgcttttcaaaaagcatccttcagacattcctttgaggaggtctcttgctaacctccctcactattggtgtgtgggaacatctttatgctgctctcaatcacgaaagcactgttgtgggctcagggctctaggcygacagggactatctctgcgttttggaggcagcagtgttccgtggctgtgctgagatgtgtggcctgtgagcctgctctgtggtgggctctgtcctcacccctgcactcggccgagtttcttctgctttcggtgtctcgggttcactgcggagtgtcgggacctgggtttcttttttgtttgtttgtttgtttgtttgtttgttttgagacggagtctcgctctgtagcccaggctggagtgcagtggcgcaatctcggctcactgcaagctccgcctcccgggttcgcgccattctcctgcctcagcctcccgagtagctgggactgcaggcacccaccaccgttaatttggtttctttttatttttcctctctggatatgttttgtggccagatctgtggattcacaaatcttgtcattctgtgaattttgcagccacacactgaaagtttgccttctgcctttctgtgttttccattatgaggctctggtgtgtccactttgccccaggtcctccaggtctcttacctcacttagattttgttttcatttgaatcttaggtgcacagttgagtaacgcatcttatcattaatccacatgtggccatttttaaattattaatttgtcaccgtaacaaacagacccttgtgagcccacagcaggaaaactaggcactgtggaaactgcctgcccctcacccattctgtatctgcgtctagcttgatctttcccttgcccttcttacaatttcatttgttgcatctctagatatttctagcttcctaaaaagtgtactatttggcttcagcatttggtgtagccctaaccaacccctactgaagcaagaccttatgcacaccccatgcagatccccgagaatcatgacattctcctggctgggggaacaggcaccgtgcccagccctgtgtgggcatcagaggtggttccctctggtcctgtcggcggatctctccccagcctcctcattcacagcgggatgtgctcgtctgaaccctcagcaggggtcctgggccattgtcccgggtcttctctctgtgtggccacctcctctctggcgctctggcctgcaaactgcagccacctccgtttccctcgctctcctttccagcgtctcagctcagggagtccacccaggctgcaccctccctgtgctgcaatctagaaactccctcgaggcagcgagcagggtggcaggggggcctccttgttggcttccctcagggaccactgacccttacggtctggtgtccatggtctggaaggtcatcggcacgtgtgttttgtttatttggggcttgtttcggacagtagggtaaattcgatccctattattccatctaggtcagaaatgtttgtatccatagctacgtttcacctaccgtgactggtccctgaccgtccgtcacgtgaacaaaccacagctcagctatggacgctccgcattccactgccctgcccctggtctgcagccccagccattctcttttctacttccatctctggaagctgcgtgtgctctgctgtttcttgtgaaattctcatcactgtgatgtgcgtgtgtcacttttctgagagtcccctatgtggccatcctgtaatctgttgcaacagctctggtcctttggggtcaaattgaggtctggtttctggggactcacttagagtgggctgctgtcttctgtttctagtctttattttacatttatggcttgatcttaatctgtgggaatctgggagcccccaagcacacctccctccagaggggaccttctgcttctgtcagcgggcaggacagagaactgcttcaccctggggggaacaggactcacagctgaagtcccaagcatggcttcttcatcgctggcctgaagtggggctgccacccagagcctctgctctagggctctggccgctgggccacccgtggctgtgggtcctggccgggttccctgaccccagtttctttcactgagccccgagctgcacctggatgctgcctgtgccggcatcagctgtggttgttccaggcccccggtagacccctggcctgcagtgtgatcccaccttggctgaggaggtccctgcaggttcttggtggagtggccagaggagcctgtggtgtggccagtggtagcttcagtggctttccatggccggcgtggttttgtcagaagcaagccccgcatgcccctgtttggaaatgtttatgaagcacacttcttgccatttagtgctatcgaggggctttgacgctcacaaacaggctgaagtaacagctgcataatagcaggggacgacatttgctggtggtgtaaatagctgctcttgtgtatgtcatcagtccctgagcagtcagtacacgctgcacttgcgcccgcgcgggttgcagagagcaagatggagctgcagaggtagcgtgtcactcagatggagcatctgaggcccccaggaaggtggagggacgtgggggagaggtgacatcaccacgtcacacccaagtcgctggggtacaatctggaaccagccccggactgagggtgcccggcatctctcagactcagcatctgatcaatacgccccagaggccaccatggccaccacgccaaccacagtctcgcggctttttaaaaaatcaagtaatgattgatttgtaggagtttgagtgaggcatcggatcccccggcacctgtcaagggtgtgttggtccaggcccccagtgagcctccccttctcccagggcacatggccaggaggctgcaaactgtctgctcactgccttcagctgctcttagccaccttcagctgctcttaaatggggcatcgccccagggtttctgactaaacctgttttctttccagctccgccactggctcaaggtgtagagggagcagagacgaagaccccaggaagtcatcctgcaatgggagagacacgaacaaaccaaggaaatctaagtttcgagagaaaggagggcaacttctactcttcaacctctactgaaaacacaaacaacaaagcagaagactcctctcttctgactgtttacacctttccgtgccgggagcgcacctcgccgygtcttgtgttgctgtaataacgacgtagatctgtgcagcgaggtccaccccgttgttgtccctgcagggcagaaaaacgtctaacttcatgctgtctgtgtgaggctccctccctccctgctccctgctcccggctctgaggctgccccaggggcactgtgttctcaggcggggatcacgatccttgtagacgcacctgctgagaatccccgtgctcacagtagcttcctagaccatttactttgcccatattaaaaagccaagtgtcctgcttggtttagctgtgcagaaggtgaaatggaggaaaccacaaattcatgcaaagtcctttcccgatgcgtggctcccagcagaggccgtaaattgagcgttcagttgacacattgcacacacagtctgttcagaggcattggaggatgggggtcctggtatgtctcaccaggaaattctgtttatgttcttgcagcagagagaaataaaactccttgaaaccagctcaggctactgccactcaggcagcctgtgggtccttgtggtgtagggaacggcctgagaggagcgtgtcctatccccggacgcatgcagggcccccacaggagcgtgtcctatccccggacgcatgcagggcccccacaggagcatgtcctatccctggacgcatgcagggcccccacaggagcgtgtactaccccagaacgcatgcagggcccccacaggagcgtgtactaccccaggacgcatgcagggcccccactggagcgtgtactaccccaggacgcatgcagggcccccacaggagcgtgtcctatccccggaccggacgcatgcagggcccccacaggagcgtgtactaccccaggacgcatgcagggcccccacaggagcgtgtactaccccaggatgcatgcagggcccccacaggagcgtgtactaccccaggacgcatgcagggcccccatgcaggcagcctgcagaccaacactctgcctggccttgagccgtgacctccaggaagggaccccactggaattttatttctctcaggtgcgtgccacatcaataacaacagtttttatgtttgcgaatggctttttaaaatcatatttacctgtgaatcaaaacaaattcaagaatgcagtatccgcgagcctgcttgctgatattgcagtttttgtttacaagaataattagcaatactgagtgaaggatgttggccaaaagctgctttccatggcacactgccctctgccactgacaggaaagtggatgccatagtttgaattcatgcctcaagtcggtgggcctgcctacgtgctgcccgagggcaggggccgtgcagggccagtcatggctgtcccctgcaagtggacgtgggctccagggactggagtgtaatgctcggtgggagccgtcagcctgtgaactgccaggcagctgcagttagcacagaggatggcttccccattgccttctggggagggacacagaggacggcttccccatcgccttctggccgctgcagtcagcacagagagcggcttccccattgccttctggggagggacacagaggacagtttccccatcgccttctggttgttgaagacagcacagagagcggcttccccatcgccttctggggaggggctccgtgtagcaacccaggtgttgtccgtgtctgttgaccaatctctattcagcatcgtgtgggtccctaagcacaataaaagacatccacaatggaaaaa

SEQ ID NO: 117 - DNA, 1010 bp, Homo sapiens
  Genbank Accession No. AL050228
ttgacataagatctcatttgcagaaagcagattaaagaccatcagaaggaaattatttaggttgtaatgcacaggcaactgtgagaaactgttgtgccaaaaatagaattccttctagtttttcttgttctcatttgaaaggagaaaattccactttgtttagcatttcaagcttttatgtatccatcccatctaaaaactcttcaaactccacttgttcagtctgaaatgcagctccctgtccaagtgccttggagaactcacagcagcacgccttaatcaaaggttttaccagcccttggacactatgggaggagggcaagagtacaccaatttgttaaaagcaagaaaccacagtgtctcttcactagtcatttagaacatggttatcatccaagactactctaccctgcaacattgaactcccaagagcaaatccacattcctcttgagttctgcagcttctgtgtaaatagggcagctgtcgtctatgccgtagaatcacatgatctgaggaccattcatggaagctgctaaatagcctagtctggggagtcttccataaagttttgcatggagcaaacaaacaggattaaactaggtttggttccttcagccctctaaaagcatagggcttagcctgcaggcttccttgggctttctctgtgtgtgtagttttgtaaacactatagcatctgttaagatccagtgtccatggaaacattcccacatgccgtgactctggactatatcagtttttggaaagcagggttcctctgcctgctaacaagcccacgtggaccagtctgaatgtctttcctttacacctatgtttttaagtagtcaaacttcaagaaacaatctaaacaagtttctgttgcatatgtgtttgtgaacttgtatttgtatttagtaggcttctatattgcatttaacttgtttttgtaactcctgattcttccttttcggatactattgatgaataaagaaattaaagtgaaaaaaaaaaa

SEQ ID NO: 118 - DNA, 1377 bp, Homo sapiens
  Genbank Accession No. M15917
agactgtgcagttgtctcccctcttagcatctcagctgccttgaccattttgtctctgggagcaaaagacagcaccatggaagagattctagaaggtctcaagttcaatctcacagagatcactgaggaagaaatccaccagggctttgggcacctcctacagaggctcagccagccagaggaccaggtagagatcaatacaggtagtgccctgtttattgacaaagagcagccgatactgtcagaattccaggagaagacaagggctctgtaccaggctgaggccttcatagctgacttcaagcagcccaatgaggccaaaaagctcatcaatgactatgtgagcaatcagacccaggggaagatcgcagaactgttctcagacctggaggagaggacatccatggtgctggtgaactatctcctatttaaaggcaaatggaaggtcccctttaaccctaatgacacatttgagtctgagttctacttggatgagaagaggtctgtgaaggtgcccatgatgaaaattaaggaactaaccacaccctatgtccgggatgaggaactctcctgctctgtgttggagctgaagtacacaggaaatgccagcgccctgtttatcctccctgaccaaggcaagatgcagcaggtggaatccagcttgcaaccagagaccctgaagaagtggaaggactctttgatccctaggattataaatgatctccgcatgcccaagttctccatctccacagactacagtctaaaagaggtccttccagagctgggcattaagaaagtcttctcccagcaagctgatctgagtaggatcacagggaccaaggatctgtatgtctctcaagtggtccacaaggctgtgctggatgtggatgagacaggcacagaagcaactgctgctacaggggtcgctacagtcatacgtagacaacctcgaactctgaatttcaaccggccattcatggtggttatcactgacatggatagtcagtctatcctctttgttgccaaaatcactaaccccaagtaagcccaaagctccccaagatctgacagttctgcccaggaccctgggactgagcctgcatgtggatctctgtacatgtcctgacattcatgctctgattggctgtttcaaagttgtcttagacagtgacatcgactatctctatggcccccatgtgcacaggagcctttagactgtcagtgtcaggctcttaggccccttgggagcatctacccatgtttctgaacctggaatctatctttatttttccctagtgactcctctttctgtgttcataccccaaacctagttattggcaagtacatccagtcccaataaataaatgctttgagcac

SEQ ID NO: 119 - DNA, 1663 bp, Homo sapiens
  Genbank Accession No. D00752
agtgacaaccctgaacatcaggtgtcagcaaacacagaggctggcagctggctggtatcagctctgcagccaggaggacagagaagatggccttcattgcagctttggggctcttgatggcagggatctgccctgctgtcctctgtgatggcacactgggaagggacactctatcccatgaagaccacggcaaggggagacaactgcacagtctcacattggcttccagcaacactgacttcgcattgagcctctacaagaagctggctttgaggaatccagataaaaatgttgtcttctcccctcttagcatctcagctgccttgaccattttgtctctgggagcaaaagacagcaccatggaagagattctagaaggtctcaagttcaatctcacagagatcactgaggaagaaatccaccagggctttgggcacctcctacagaggctcagccagccagaggaccaggtagagatcaatacaggtagtgccctgtttattgacaaagagcagccgatactgtcagaattccaggagaagacaagggctctgtaccaggctgaggccttcatagctgacttcaagcagcccaatgaggccaaaaagctcatcaatgactatgtgagcaatcagacccaggggaagatcgcagaactgttctcagacctggaggagaggacatccatggtgctggtgaactatctcctatttaaaggcaaatggaaggtcccctttaaccctaatgacacatttgagtctgagttctacttggatgagaagaggtctgtgaaggtgcccatgatgaaaattaaggaagtaaccacaccctatgtccgggatgaggaactctcctgctctgtgttggagctgaagtacacaggaaatgccagcgccctgtttatcctccctgaccaaggcaagatgcagcaggtggaatccagcttgcaaccagagaccctgaagaagtggaaggactctttgatccctaggattataaatgatctccgcatgcccaagttctccatctccacagactacagtctaaaagaggtccttccagagctgggcattaagaaagtcttctcccagcaagctgatctgagtaggatcacagggaccaaggatctgtatgtctctcaagtggtccacaaggctgtgctggatgtggatgagacaggcacagaagcaactgctgctacaggggtcgctacagtcatacgtagacaacctcgaactctgaatttcaaccggccattcatggtggttatcactgacatggatagtcagtctatcctctttgttgccaaaatcactaaccccaagtaagcccaaagctccccaagatctgacagttctgcccaggaccctgggactgagcctgcatgtggatctctgtatatgtcctgacattcatgctctgattggctgtttcaaagttgtcttagacagtgacatcgactatctctatggcccccatgtgcacaggagcctttagactgtcagtgtcaggctcttaggccccttgggagcatctacccatgtttctgaacctggaatctatctttattcttccctagtgactcctctttctgtgttcataccccaaacctagttattggcaagtacatccagtcccaataaatgctttgagcacatctgct

SEQ ID NO: 120 - DNA, 1671 bp, Homo sapiens
  Genbank Accession No. X16357
aacacaccagggaagtgacaaccctgaacatcaggtgtcagcaaacacagaggctggcagctggctggtatcagctctgcagccaggaggacagagaagatggccttcattgcagctttggggctcttgatggcagggatctgccctgctgtcctctgtgatggcacactgggaagggacactctatcccatgaagaccacggcaaggggagacaactgcacagtctcacattggcttccagcaacactgacttcgcattgagcctctacaagaagctggctttgaggaatccagataaaaatgttgtcttctcccctcttagcatctcagctgccttgaccattttgtctctgggagcaaaagacagcaccatggaagagattctagaaggtctcaagttcaatctcacagagatcactgaggaagaaatccaccagggctttgggcacctcctacagaggctcagccagccagaggaccaggtagagatcaatacaggtagtgccctgtttattgacaaagagcagccgatactgtcagaattccaggagaagacaagggctctgtaccaggctgaggccttcatagctgacttcaagcagcccaatgaggccaaaaagctcatcaatgactatgtgagcaatcagacccaggggaagatcgcagaactgttctcagacctggaggagaggacatccatggtgctggtgaactatctcctatttaaaggcaaatggaaggtcccctttaaccctaatgacacatttgagtctgagttctacttggatgagaagaggtctgtgaaggtgcccatgatgaaaattaaggaagtaaccacaccctatgtccgggatgaggaactctcctgctctgtgttggagctgaagtacacaggaaatgccagcgccctgtttatcctccctgaccaaggcaagatgcagcaggtggaatccagcttgcaaccagagaccctgaagaagtggaaggactctttgatccctaggattataaatgatctccgcatgcccaagttctccatctccacagactacagtctaaaagaggtccttccagagctgggcattaagaaagtcttctcccagcaagctgatctgagtaggatcacagggaccaaggatctgtatgtctctcaagtggtccacaaggctgtgctggatgtggatgagacaggcacagaagcaactgctgctacaggggtcgctacagtcatacgtagacaacctcgaactctgaatttcaaccggccattcatggtggttatcactgacatggatagtcagtctatcctctttgttgccaaaatcactaaccccaagtaagcccaaagctccccaagatctgacagttctgcccaggaccctgggactgagcctgcatgtggatctctgtatatgtcctgacattcatgctctgattggtgtttcaaagttgtcttagacagtgacatcgactatctctatggcccccatgtgcacaggagcctttagactgtcagtgtcaggctcttaggccccttgggagcatctacccatgtttctgaacctggaaatctatctttatttttccctagtgactcctctttctgtgttcataccccaaacctagttattggcaagtacatccagtcccaataaataaatgctttgagc

SEQ ID NO: 121 - DNA, 1806 bp, Homo sapiens
  Genbank Accession No. L35108
ccacgcgtccgctgtgccctgcgctcgccacttcgcacccgcacgcccgaccgaccgcgccgccgcctgcctcgccatgggtcgacagaaggagttgatgaaccgttgcggggagatgctccacatccgctaccggctgcttcgccaggctctggcggagtgcctggggaccctcatccttgtgatgttcggctgtggttccgtggctcaagtggtgctcagccgagggacccatggtggcttcctcaccatcaacttggcttttggcttcgctgtcacccttgccatcttggtggctggccaagtgtctggagcccacttgaaccctgctgtgacctttgcaatgtgcttcctggcacgagagccctggatcaagctgcccatctacacactggcacagaccctcggggccttcttgggtgctgggattgtttttgggctctactatgatgcaatctgggcctttgctggcaatgagcttgttgtctccggccccaatggcacagctggtatctttgccacctatccctctggacacttggatatggtcaatggcttctttgatcagttcataggcacagcagcccttattgtgtgtgtgctggccattgttgacccttataacaaccctgtgccccggggcctggaggccttcactgtgggccttgtggtcctggtcattgggacctccatgggcttcaattctggctatgccgtcaacccagctcgtgactttggacctcgccttttcactgccctggctggctggggttcagaagtctttacgactggccagaactggtggtgggtacccatcgtctctccactcctgggttccattggtggtgtcttcgtgtaccagctcatgattggctgccacctggagcagcccccgccttccactgaggcagagaatgtgaagctggcccacatgaagcacaaggagcagatctgagtgggcagtgcacacacacacacacccccactgctcactctcttgagtgtccactgactgtgtgggggacaccccataaaagcccccttgtgatgcctctcgggctaaaaacgctccctgtatccacccccgctggatggcccctccagaattcctactgaactctgccagctaggggattaggttcccctcttaagcccaagtaggatagcaagtaagaccaaacatcctcttgtttctgaaaaggaagaggatgtggagagagagagagagagagagagagagagagagagagagagagagagagagagagagagcgcaagtgtatgtgtgctgttctccaggctgaaagcaagggcaagggaccaagttttcaaaacaaactagcagctcaagggaacccaggggaagggagagagtgagtcaggaaagtgccacagtatacttgcttcagggactccagtgtggaggtggacccaggagtgcgtttctaagtatgtatgtgtctactgagttttcgaaatggacttctaggcttagggagcgggggaggcataagaggggcgtagctcacatctggagctgtgatcctcaactaggggctgtgtatgtaatatgtttctgttataagatagacattgggaggggctaaagtcctggtcgtaagtttcataatttgttttttttaaatatataaatatatacatacatatatatgttacagttttaggaatgaggggtgggaaactccactttttaaaagggtcttccttcctttaatcccccaatcaacaatgtactgttgccttttatatataaagaaaagaataaaatgtatgcatttgacagga

SEQ ID NO: 122 - DNA, 1715 bp, Homo sapiens
  Genbank Accession No. D17695
cagaaggagttgatgaaccgttgcggggagatgctccacatccgctaccggctgcttcgccaggctctggcggagtgcctggggaccctcatccttgtgatgttcggctgtggttccgtggctcaagtggtgctcagccgagggacccatggtggcttcctcaccatcaacttggcttttggcttcgctgtcacccttgccatcttggtggctggccaagtgtctggagcccacttgaaccctgctgtgacctttgcaatgtgcttcctggcacgagagccctggatcaagctgcccatctacacactggcacagaccctcggggccttcttgggtgctgggattgtttttgggctctactatgatgcaatctgggcctttgctggcaatgagcttgttgtctccggccccaatggcacagctggtatctttgccacctatccctctggacacttggatatggtcaatggcttctttgatcagttcataggcacagcagcccttattgtgtgtgtgctggccattgttgacccttataacaaccctgtgccccggggcctggaggccttcactgtgggccttgtggtcctggtcattgggacctccatgggcttcaattctggctatgccgtcaacccagctcgtgactttggacctcgccttttcactgccctggctggctggggttcagaagtctttacgactggccagaactggtggtgggtacccatcgtctctccactcctgggttccattggtggtgtcttcgtgtaccagctcatgattggctgccacctggagcagcccccgccttccactgaggcagagaatgtgaagctggcccacatgaagcacaaggagcagatctgagtgggcagtgccacacacacacacacccccactgctcactctcttgagtgtccactgactgtgtgggggacaccccataaaagcccccttgtgatgcctctcgggctaaaaacgctccctgtatccacccccgctggatggcccctccagaattcctactgaactctgccagctaggggattaggttccgctcttaagcccaagtaggatagcaagtaagaccaaacatcctcttgtttctgaaaaggaagaggatgtggagagagagagagagagagagagagagagagagagagagagagagagagagagcgcaagtgtatgtgtgctgttctccaggctgaaagcaagggcaagggaccaagttttcaaaacaaactagcagctcaagggaaccccagggggaagggagagagtgagtcaggaaagtgccacagtatacttgccttcagggactccagtgtggaggtggacccaggagtgcgtttctaagtatgtatgtgtctactgagttttcgaaatggacttctaggcttagggagcgggggaggcataagaggggcgtacgtcacatctggagctgtgatcctcaactaggggctgtgtatgtaatatgtttctgttataagatagacattgggaggggctaaagtcctggtcgtaagtttcataatttgttttttttaaatatataaatatatacatacatatatatgttacagttttaggaataggggtgggaaactccactttttaaaagggtcttccttcctttaatcccccaatcaacaatgtactgttgccttttatatataaagaaaagaataaaagtatgcatttgacag

SEQ ID NO: 123 - DNA, 1649 bp, Homo sapiens
  Genbank Accession No. AF104416
gtctcgggtgcttgcgctagctatttgcactcgtacgccgccggacctcgccgctgcctgcctcgcgccatgggtcgacagaaggagttgatgaatcgttgtggggagatgcttcacatccgctaccggctgcttcgccaggctctggcggagtgcctggggaccctcatccttgtgatgtttggctgcggctccgtggctcaggtggtgctcagccgtggcacccatggtggcttcctcaccatcaacttggcttttggcttcgctgtcacccttggcatcttggtggctggccaagtgtctggagcccacttgaaccccgctgtgaccttcgcaatgtgcttcctggcacgagagccctggatcaagctgcccatctatgcactggcacagacactgggggccttcttgggcgctgggattgtttttgggctgtactacgatgcaatctgggcctttgccaacaatgagcttttcgtctctggccccaacggcacagctggaatctttgccacctatccctctggacacttggacatggtcaatggcttctttgatcagttcataggcacagcgcccttattgtgtgtactggccatcgttgacccttataacaaccctgtgccccgtggcctggaggctttcactgtgggcctggtggtcctggtcattggaacctccatgggcttcaattctggctatgccgtcaaccctgcccgtgactttggacctcgcctcttcaccgccctggctggctggggctcagaagtcttcacgactggccggcactggtggtgggtacccattgtctccccactcctgggttccatcgctggtgtcttcgtgtaccagctcatgattggttgccacctggagcagcccccaccctccaccgaggaagagaatgtgaagctggcccacatgaaacacaaggagcagatctgactgtcactctcctgagtgtccactgactgtgtggggaccagtccccgaaagccctttgtgatgcctctctcgggctaaaccgctccctgtgtccacccctgctggatgggccctccagaatttctatgaactctgcccattaggcgatgtgaggttcccacccacctttaagccaaggtaggatagcaaataagatggagatttagagagagagagagagagagatatttatagagagagaatgaatgtgtacatgtgtgctgttttctaagctgaatgatgcaaaggcaagggaccaagttttcaaaacaaactgtagcagctcaggggaagggagcccaggggaagggagattgtgtctcatgttgtgccagagtgtgcatgcttcagggactcctccatgtggaggtggacccagaagtgagtttctaagtatgcgtgtgcctactgtttttttttttttttttgaaatggacttctaggcttgctgatggggaagggataagaagggtgtagctcacatctggagctatgacccttgactgggggctgtgtaatatgtttctgttataagatagacattgggaggggctgaagtccaggtcgtaagtttcataatttgttttttaaatatataaatatatacatacatatatgttacagccctaggaataggggtgggaaactccactttttaaaagggg

SEQ ID NO: 124 - DNA, 1140 bp, Homo sapiens
  Genbank Accession No. S78079
ctcggctggcggccccactccagtccgaacacatgtgcccgcctcacccggcagccgccaccgcggggcgcagcggagacccctggcccggcggcctgtggggacctaaagaggcggcatgagcagcgcacggtggagctgacgccgcgccccctgcccggcccatgtccttcgccatgctgcgttcagcgccgccgccgggtcgctacctgtaccctgaggtgagcccgctgtcggaggatgaggaccgcggaagcgagagctcgggctccgacgagaaaccctgccgtgtgcatgctgcgcgctgtggcctccagggcgcccggcggcgggcaggaggacggagggccgcgggtagcgggccaggacccggggggcggccaggccgcgagccccggcagcggcacacagcgaatgcgcgcgagcgggaccgcaccaacagcgtgaacacggccttcactgcgctgcgcacactcatccccaccgagccagcggaccgcaagctctccaagattgagacgctgcgcctggcctccagctacatttctcacctgggcaatgtgctgctggtgggtgaggcctgtggcgacgggcaaccatgccactcgggacccgctttcttccacagcggtcgtgcgggcagcccactgccaccgccgccgccgccaccaccactggccagagacggcggcgagaacacccagcccaaacagatctgcaccttctgcctcagcaaccagagaaagttgagcaaagaccgtgacagaaagacggcgattcgaagttagaaggaggagggtccacagcagccaagaggtgatgccactagtgaaggtggatgccactgaagagtcacggagagccccactttggacctgatctgagcgcaggtccccaagagcacgctcaccaggccagacctgccccagctatgagcagggcctatgaacagagagatggacaggcgggtgatggcttgactctaagcagccgaacactgacccaggcccactgggactttccatgctggctctctacctgggccaagtgttggcatcttgtgtctttaatatgataatataaagtctggaaattttgtataattaaaaatgaaacagtatcttccaaaaaaaaaaaaaa

SEQ ID NO: 125 - DNA, 5271 bp, Homo sapiens
  Genbank Accession No. D14313
gcgagaggatcatggcggatggccccaggtgtaagcgcaggaagcaggcgaacccgaggcgcaacaacgtcaccaattacaataacgtgatagaagcaaactcagattcagatgacgaagataaattgcatatagtggaagaagaaagtataactgatgcagcagactgcgatgcaagtgtgccagaagatgacttgccaacagaccacaccgtgttaccagaaaacagtgagagggaagggagcacaaacagctgctgggaagatgaaggaaaagaaacaaaggaaatcctggggcctgaagctcagtcagatgaagttggatgtacagtaaaagaagatgaatgtgattctgatgcagaaaatgaacagaaccatgaccctaatgttgaagaattccttcaacaagaagatacagctgttatttaccctgaagcacctgaggaggaccagagacaaggcacaccagaagctagtggtcaggatgaaaatggaacgcccgatgcattttcccagctgctcacctgcccgtactgtgacagagggtacaaacgcttcacctctctgaaggaacacattaaataccgccatgaaaagaacgaggataacttcagttgctccctctgcagttacacgtttgcgtatagaacacagctggaccgccacatgacgtcgcacaagtcaggacgagatcagagacatgtgacgcagtccagtggtaatcgaaaattcaagtgcactgaatgtggaaaagcttttaaatataaacatcatctaaaggaacacctacgaattcacagtggagagaagccatatgagtgcccaaactgcaagaaacgtttttcccattctggttcatacagctcacacataagcagtaagaagtgtattggtttgatgcccgtaaagggtcgagctcggtcagggctcaagacgtctcagtgctcctccccttccctttctgcatcgcccggtagcccagcaagaccacagatacgacaaaagatagaaaataaacccttgcaagagcaacttcctgttaaccaaattaaaactgaacctgtggattatgaattcaagcccatagtggttgcttcaggaattaattgttcgacccctttgcagaatggggtttttagtggtggtagcccgttgcaggcaaccagttctcctcagggtgtggtgcaagctgttgttctgccaacagtgggtctggtgtctcccataagcatcaacttaagtgacattcaaaatgtacttaaagtggcagtggatggtaatgtaataaggcaagtattggaaaacaatcacgctaatcttgcatccaaagaacaagaaacaatcagcaatgcatctatacaacaagctggccattccctcatttcagctatcagtcttcctttggttgaccaagatgggacaaccaaaattatcatcaactacagcttggagcagccaagtcaacttcaggttgttccccaaaatctaaaaaaagaacattctgttcctacaaacagttgcaaaaatgaaaagttaccagaagatcttacggtgaagtctgagaaagataaaaactttgaaggagagaccaacgatagcacttgtcttctttgtgatgactgtccaggagatcttaatgcacttcaagaattaaagcactatgaaacaaaaaatcctcctcagcttccccagtccagtggaacagaagctgagaagcccagctcccctgccccatcagaaactggggagaacaacttatctcctggtcagccacccttaaagaaccttttatcgctcctaaaagcatattatgcattaaatgcacaaccaagcgcagaagagctttcaaaaatcgccgattccgtgaacctaccactggatgtggtaaaaaagtggtttgaaaaaatgcaagctggacaaatttctgtgcagtcttctggaccatcttctcctgaacaagttaaaataagcagtcccacagataacgatgatcaagcagcaactacaaatgagagtgaaccccagaacagcacaaacaactcacaaaatccggccaatacaagtaaatctcagacttcatcagggggatcaactcagaatggttcgcgcagtagcacgccatccccatcaccactaaacctttcttcatcaagaaattcacagggttatacgtacacagcagagggtgtacaagaagagccacaaatggaacctcttgacctttcactaccaaagcaacatggagaactgttggaaagatctaccataactagtgtttaccagaacagtgtttattctgtccaggaagaacctttgaacttaacttgtgcaaaaaaagaaccacaaaaggacaacagtattacagactctgatcctattgtaaatgtaatcccaccaagtgccaatcccataaatattgctatacctacagtcactgcccagttacctacaattgttgccattgctgaccagaacagtgttccatgcttgagagctcttgctgccaataagcaaaccattttgattccccaggtggcttatacgtactctactacagttagtcctgcagttcaggaaacaccaccaaaacagacccaagccaacggaagtcaggacgaaaggcaggacactagctcagaaggagtatcgaatgtagaagatcaaaatgattctgattcaacacccccaaagaaaaagatgagaaagacagaaaatgggatgtatgcatgtgatttgtgtgacaaaatattccagaagagcagctcattattgagacataagtatgaacacacaggtaaaagacctcatgagtgtggaatctgtaaaaaagccttcaaacacaaacaccatttgatcgaacacatgcgactgcattctggggagaaaccctaccaatgtgacaaatgcgggaagcgcttctcacactcggggtcgtactctcagcacatgaatcatcgctactcctattgcaaaagagaggcagaggagcgtgacagcacagagcaggaggaggtgggacaggaggtgctcagcagcgagcatgctggtgccagagcatcgccatcgcagatcgactccgatgagagagagagtctaaccagggaagaagaggaagatagtgaaaaagaggaagaggaggaggaagaaaaggacgtagaaggacttcaggaagaaaaagaatgtagaaaactacaagatgtagaggaggaagaagaagtagaagaagaagaagaagaagaggaagggaaaactgaaggtaacaagaacgatgacgttgtaaatcgagcaagcaatgcagaaccagaagttatacagagcaatgggcaggtgtcagaagaaaaaacaaataaagcttaaatgatagttttttctatatggaaaaaaataaatcagtaatgaagatcgttctatattatacatgcttttcatggaaacacggtagcctgcatactgtgatttctgttcactactgtgtaaaaaaatatatatataaaaaaaaagaaaaaagaaaaaaaaaagaaatccaggtgtgcctgaacctcaaacttagtaatttttcacacagttttcaaagttaggaacaagtttgtaacatgaagcagattagaaaaatacagtgactctggaagcaaaggtttaacaggttgtaggaaacctgatttattagacaagcatctggcattgtttgttttatcagtattaattctcattcttacgttcattaatttttaagctgtacaattgggagagatttatatgattttttttttttttatggcaaaacatttcctaaatccgcttcagtattttattatgtttttaaaatgtgagaacttctgcactacagaattcccttctgcagaaacctctaacagtgcttggctacctttgtaaattcaacctagaaggtagcggttataacattagatgttgtagtagagcatattatcatttaaagtgtattgttagccttaagaaagcagatgatagaagaaccgaagtttcttactcatgtggttaaaaatgtagttgaaaagattgttgttgagttctgattgcagggactaacagtgttaataccggtaaggacagcaaagtcgtcaaaatcagtgtttgtaattgtgttttgagtatgtagtaacaatatgaaggatatgatatgaagctttgtatctcctttggccttatgcaagacctgtgtgctgtaagtgccatttatcagtattacaaaggctctcaccggcctttctccaatgcgtggcctacaataactagcatttgttgatttgtatcaaacttctaatctaatcatgggggaaaaaacactcagccatcagagaagtaagaacactggtatctttcattatttaattatttggtggtatttttggttaatacctgacttgcagaatttctctacgataattacaagggaaattttctaatctgctttattgctttatcagtttactttaatttcagacacatacatgacatgttatctggctcataagtattttcaaatgttagttattatggaccccatttattaacaatgttagctgatttttacctatcagtattattttatttcttttagtttatagatctgtgcaacattttgtactgtatgtctccaaacctggcagtattaatacccttcttactgacatatgtacctttttagttttagaaaacttttatatttatgtgtcttatttttatatttctttatttattacacagtgtagtgtataatactgtagtttgtattaatacaataatatattttagtatgaaaatttggaaagttgataagatttaaagtagagatgcaatcggttctcttgcattgagatttgatttaacagtgttatgttaacatttatacttgccttggactgtagaacagatgaattaaaatgggaatgtattaattttacaattgcaatcaattcattttacctttacccagtttttaatataaagctcttaaattttgaaattcactgtgtgactaatagcatgatgctctgcagttttattaagagattagcctaaccataaaactctcatttccttagtaagccaaattagagtaatcttataaacagtgttgggaacaacgtttaacttttttgtgccaatttgttcctgtattcatgtatgtatgttacaaatctgaaacttcatttttaagttccttgttacatcatggtcattttctagttttttaccagactccccatctcacaataaaatacgtcaacaa

SEQ ID NO: 126 - DNA, 22268 bp, Homo sapiens
  Genbank Accession No. D76434
ggatcctcgcagcgctgggcctcagagtcaaagcgtgctccctttctgattagtttttcatcttccctgcaaaacactttaaacttaatataaggagctctacttaatttcccaaaccaaacagggaaatttaaaaaaaataattcaagaattagttatctttgtaactgaaatctgaacatttacctgtatatataacatatatctgtatatatattgcatgtgaattttgatctctactgttatttatctcctttgcctgtagcaaaagtctgtgtgtcagggttttctagtcacagtcctccacatgtaagcgtcactgccaacgggacaaaaggatttttccatgtcctccttgtatttcttgtctgttcttgacctttttaaaacttgcatttacacttttcatgcatggaaattcataaatctcttctgctgtggtgagggtgtctatgcatgtcttacctttcacctacgttacctcagtacctttttactttgcagaatccgttacagaatattaagtgagaatcaatttcttgatagaaatgggtcaaatacgagtatttaggcaattttatctagatttgttaccttggaatagcttgataccatgaattagggtgcatagtacatttttcaaataatgctacatgtgtaaaatatggaaacatgattattttagattcaaaaggctcttttgtcatgcttatgcatatttgagaagggaaaattggcccccaaaaggggaagaaaagaaaaaaccgcctggccaatcaaaaagccaaccaactttccctgcttaaatgcgtttttaaatgactagagtatctttgaaaaaagaaggaagaaagaacaactaacttcagaagagctggagttgaatctcctatttatctgcattaataagccgggttcacttgagacgaccagtctatcttgtggtgtgctggcagtgccagtaggcaggggttgcagagtctgcggctgtgtgcatctcagctgtggttctgcaaccaccaaagggctcccgcagccagggagctcttttgatttggtcgttggtaactataatgacctggtgcagcctcatgctgggccgcatgtgctgcaggtgccttctcctgtgccgccattatgtccaggttgctctcaagctgctgctgtccacatagggaaaaaaaaattaatgatgtgactccatagagatgccctagatgtagcttctggctacagcactgaaggcttcggagtttgcagtaaattaagagtgtattgatcagtatttcgctttttgtctgtccacagtcaccaattacaataacgtgatagaagcaaactcagattcagatgacgaagataaattgcatatagtggaagaagaaagtataactgatgcagcagactgcgatgcaagtgtgccagaagatgacttgccaacagaccacaccgtgttaccagaaaacagtgagagggaagggagcacaaacagctgctgggaagatgaaggtacgttcgttttcactgatggtgctctgtaatgtttctgagaagactggatagaattttttggttactttgttactgaaatgattagaagtgataaacatgtaattattgtgctatactttattttcttaataaatggaaatcttcttctcaaacgtgccattttaattaagatttgttgactaaaatgaagcatttgaatcaaactctactgtaattgtgtagtgagaatgagattctctctgccttggtcattggttactcagccaggcttccatcagacagatgactgtcttagaggcttactgaaattactgtaaatttcttatgtaaaaatgacgagttctgaagccccttttgtagcagccaggaggattttttttatctgatagtaaggttttttaaaatagattgtttgaacctctggcaaaagctgcgtgagaaaaatgaaggctaaattatgtttcatggagctttgatttgccatggtaaaactctatttacttttttatggctttcattgaaagaaaggtgcaagctgaaaatcacatcatcagtcctggttgtacattagaaatcctaagagtagagtattgaatacgtgatcttcatctcaaagggagcagtgctggggtagtgtcagtgctgtgctgacactgtcactgagagtggcaattgtctttagagaacatgcagtttcagtaagttgttttttatcactggattagtactgaaagtccctacttgtagttggacttggcagaatgggttttctacacatttcttcggttcgcaaaagcacgagaataggaacacacgtaacatctcttgatcagattagtttccttccgtttccagtcattctaactgaacttctacaagaccttcagaacaggtggtttaaatataaggtgtgtatctccagaggtttaactgaagcagtcacgccggtttgaagaagtgaaccacgtgtatccggcaccagctgctggcggggtgccagcattcgtgtgtgcagtgatgctgtgatgtgagctttttttgctgtaggttagactaaaccctctgctacaattaagaaaggaaatgtcaaaccccattgactcgttatgttaataaacttgaaaaaaatactagttatgtatttgagtatttagggaatctggagatctcaggcctggaactaagctaggtttgaaaaattaacagttaaaaaaaaatgtgccaacagtgaaataaactttcagaaccaatgaaattatgtttacgtgtaaggtccttctggaattcaaaatacctttaacatataacatgttaggttgagcttacgtacagtaggattgtgttctctcagtgtgatgggttgctagtgaaggatgctgcactattttgtattaattacatttgaggggaggttaaatgttcatggcatcaacttgaccaagttttctgcttacaaccaaattttcagtttttctagtgagttatcttatccatctccggatccttacagtcagcttgtgacatcgtggtagtgtcatgtatggtggaaattagcagcatttagctctgaaagtcccctgtatccctgagcagcagttcaggagaaatgatcggatgctgcacagaacagagccaagtagtgctgccatgctgaggtgtctatggcagggccaagcagagctcagtggccttaaagaagccatttttcacttggttgtggtttctgagtggctgactagatctaattcgatggctctaccgggtgctgtagagatgcataagagtgtggctgtgtgtccgtattcccacccagtgcaaggaacttcgtcagtccttctgctgcttgccagcagtagaatggaacttgctagagacactataatttaagcccctataggtaataacttacagatagtagctctgttcctcatagtctatttcataatggggaaaaatcacaaacttttttaggaagaaaaatagtgtagttggtatcataaatatttttaagaaatcgaaattttggatttgaattttcattgcctgccacgactgccatacatattctgaacaaagcctgtggtacaggagccaaaaatacaattacttcacagtcagttattgactaatgttttttgtactgtggagagtttttttttcagatgctaattcaaatcaatgaaagatttatgtcttacagtttcctttttgccttttttgtttgtttgtgactatctgcagatagagcttcccctcctttccctcgtaagtctggtgggttttgtaaaggcagaccaaactaagagtcttttcctttaaggaagccatttgtatctgggaaatcaagcttgacctaggatttctcatctcacatataaaggaggaattggcttttcctatatctaaatctggttcgttctgcggttctgactgagcatgccaaaaatttttccctgcactgaattagagtgaagtaatgtaaataaaaatataacagttggcatcttggatcctgccagtcatgcattctagcatctaaaatcacgtaagagtctttctttgctctataggctctgaagcacgtaccatctccaaaataaagctatgactattggctgctactgactgctatgctgtttgcatacagcaacatagtgtactaacagataaaggagtgaaaaaaatggtaccgtttcactgtatgctccaaagcctttctatgtttctctgaagaaagggaaagtagcgtgcagctttgcagacatgacctgcaaatcatcaactgtttccaaaaactgctaaatgaaataatgaagtaaatttaatatttttctgatactctgtttttggaaaatgatgttcagtgtatcagttagcttcatttaaatagctcattccatatttgctggagaaacacactgtcctagtctttacctgtcttcacctgtcttcaaatgctgccctaatgtctactgtgtagtgtggcttcctttgaaaatttaatttctttcactgtaaaatatctctgtggttcaaccaattatgctggagaaatgtggaatccatattttttaaagtaggttgtcctttaatgcaattagagaagtggaaaaaaaatgctgtagaaatagctcctcaaatacattacacttgtgggtatgtggttctgttgtgttttgttgttgttgttgttattgtttgagggtgttggtttggggctttattttttttattttttattttttggaatatttgttgttctttttctgaaatgtaatatttcagcaggaaaagaaacaaaggaaatcctggggcctgaagctcagtcagatgaagttggatgtacaggtatttgtttgtttatctgtttcccttattcttatagcttgtctgccacagcttcagcaatgagaacaaaaggggacataacactggtcttattgggagaatacaactacaggccagtaggtagtgttttaaactagtaaggaatacaccaaaacaaatgtaagctggtacttatcttcttttccactcctctacttgtactgattatacagaaagccaaatgaaatgtggaacttcagtatcagaatcaaaccaggacagacttttccagatgtaggaagcaagatgttaagctgtctttcaaactaaaaggcctaaatgatgatacgtgctgtatttaagaattttaggggagataaacataaggtgcaaaatgcattgggttaaacaatgcatttttgcaaattctgcaaagaatgcaaactgtgcttttagtcatttttttaattgtcattatgtcactgtttctctgtgttaaaactctgtatgttcctataccttaaggagcttaacctatgctagtatttgtaaggagctgtgaaatccttggacagaggttgatttggaaatgtgagttactgatctcttttcctttttttttttaagttttcatttgacatcttgtatgttggttttttgctcttagtaaaagaagatgaatgtgattctgatgcagaaaatgaacagaaccatgaccctaatgttgaagaattccttcaacaagaagatacagctgttatttaccctgaagcacctgaggaggaccagagacaaggcacaccagaagctagtggtcaggatgaaaatggtaaatatgccaccagttagttcgtacaaaataaattatgttaagcacttgatcccagagttctgttgtgctttgaaagacaacaacacatgatacttgattttgtgaagcaagacatgcactgggagtcagttgtatgggtacctaaatggtagttggaagtaaaatcaatctctggtaaatacattggggttattttcccaaaaagacaatgacagagaaaattgaaatattacttacacaaaaatattcatatgattcttaatggaagcccactgagaaatactgcctttccagtagactttgaaaatattgtttcatactggaataagaaagtttttatttgattatgacttgtttttattcttaggtaattctctgtgaaacactgagttgaaaataacaccctacctaaatggtttggagatgttctgatccagttgtttatttaaaaagtccatatttgaacaaaaggtgtcgttgtggctgtattagtttactggagtctaagggagagcagtgaaaggggtgctgctgacaaattcgtcccgctctctcagagatcttctgttattagacattttagtaataaaaaagaatatatttaagaaatgtgaactgagtacctgcctatatatttcataaataggacatgagtttccaagattttgtgatttacctcacgtttagtaaaattcaactaagatatattcttaacagtagcattttgaagttttttaaaattttaatctgtagttgcagtggcacagcttgtcacgttagttttacagacttgcaatgatttccatgtaatcattaaaaatacacttaagcattaataattgaaattgtacctaactccgtaggttcagatggaagtgctctgaaagtcacaatgctgaacaatgatgctcagtgtttgaattatttggaatagaaaatgccagaaatgtagtgatatttggtaaagatggattcctccaaagcaggggagggacaagtgaggtgacagagcatcagagtatttagcactgggctttgtgaaacctctgctatttcggcatttgctccaatggaaacagaatttaggttgtgcttgtgacatttccactgacttgtgtttgtgctgaaatctgtgtccttgtgctgaaatttagtgtcgtatgaattgaattgtagatgtaaaaaatgaacggaatggaagcatgctgtatccacacatgagcatgtgttcattttacttagtcatggagaaacagaaactgaactggttagaacagcccaaaaacagtgaagtatgactgttatcagcttgttcccataagaaggggaaaagatcccgtgtgacagaaaagttcttatttctatgtgataaagaaaactggtctgactcttcactgttgcgaaagcaatggcatgttcagtgaaaatggcaggaaatcccacacaaatagggattgctactgtatggagcacatacgcaatctgtggcaataactgctggaagatgtcatgaagatagataagtcagaagtacttcaggaactaccggttaattttatcagtattaataattgctgatagttcagcaacatcaagtgacaatctgtaccccagtttgcacctcacgattcaaatcataaagtaataatctgtgcagatgttccactttcctctcgtactgtcactcagtccaatggatagatgctttgatgcaaaatctgctttccatttcccttgaatcgtggtcattgaacgttaccagaccttgtaaacaggtagtgtgatccagtactgcgaaccctgcatttctggaagcactttttccattaatctgtaaagtaagatgttttttcaatctcagaaaaaaatcttttctagcatagaataagttactatatgtgggggataacaaaatgctgataagaaaaaatggagttaaagcttcataaatgatggcttctcagaaatattcctgtcaaattaatatccagcttcaatctgatttcactttttgctggtacagaaataacttcacagaagccaatagaataaatcccatagattgtattagaatcgtatttatggcatcacattggatatctcttctttctgtctctcatctgcttctcctgcatatagtatgtcctacatagttaagcataactataaagaatatcagctgtgtttctgttctcctttctcttacaattttgtgttaagagacaagaaaatcattctctgcaacctaaaaatattgctcattcctcaggatctggaaatagggtgaccattaagtgtcgcagtgctagacttgttttgtgaacgtgatttcagggttgctagtgttagggctaaccaggcctacagagattgctaggtctaaaaccatgtgttacagtggtcagagtactttctcatcagagacacgtgcagaggctctggtgctgtgtggggacagaggtgtggttctggggaatgtcactgctgacatcctgcagcacacgctgggacagctgcaccctaccgcagtcagtaacataatacccgaagaaagagtacgaacagtcattgttccttttctaaaccagatggagctttccagcagctgcacgttttcttacagccatatgtatgaatgtagaccatgtctgtcagtgttggttgagttcagagtttacatctcatttcaatacaccatgttgtgtctcctgtgcaggaacgcccgatgcattttcccagctgctcacctgcccgtactgtgacagagggtacaaacgcttcacctctctgaaggaacacattaaataccgccatgaaaagaacgaggataacttcagttgctccctctgcagttacacgtttgcgtatagaacacagctggaccgccacatgacgtcgcacaagtcgggacgagatcaggtcagtggcagttggctgcaggccctgctgtcctctacagcagcatctggtgtgtgagcagagacctacagagcatgctggacgtttgtctcagagctttgtgggctgaagtaccaatcctggagcacttcaacctgctgctgaagtcagagttcttccgtagctaacaaagggtgtgatctgagttgctgtacttccttcatctaggcagtacggttgggtctgaattttagtttcagaagtgcaaaagatattctgagcttgtttcctgtggttcttttgttgacctgagggcatggttccttaaaatgcccatgaggagttaaccaccccattattgctgaggtgcctgaggttcccctctccctgcttttctatttttcttttatccctaggatttcccatcacccaaccccaattacatgctttcatagcttaccagaggtgctgaagctcagtaagcccagtgaagctcaccgaaacagtcaggaattagccaagaaaacagatacagatttttgaccaccaggttagagagaggcttggaaactctcccttctgagggcagactacaaagattgatactcattggagctgaaagaggagggaaacattgcagaaatacacaaagccagaatagtgaagagaatatatttcttacagctccaaaacaacagtatttcgttaaactgaaaagctctgacgtaaaattaaccaaaaaaggagatgatcttttacatactgcatattaattattgttcttcaaattatcactaattcgaaggatttatcagggttaaaagtgcactgtccttcatccccaagtgaatactttcagggaacattacaagaagtataggcagtcctgtccaagggttctgttgttctgcagggcttggaataacctcaccagcatgttctggcacagtggctctgatttattcccaacaaacaattcatttctgccttgtgctcttactgccttggcttccactttaaaggtgctatcatcccatatacagctgatatcaatgcctataaaatctgtgcatgctttttgtaaaatctagttgtgtgaaaatttccactttttccaactagaaacctaaaagcagaagaaaagagtagttggaaggacttcccatttttgctgctagttgtaatgaaaagagaaaaaatgatcaggtgaacagccagccttagaagaatgggtagaaagggaaacttagattgtatcgctgaaggaaaagtttcagatatattttaataagcttatacttttgaaggcacatggctgcatgcgccaagcaggaatgttgtttctttgaagtatctggaactcactattacaccagcttacctgtaattctctagagccatacccagagtcaaaacaataactgatcagatgcttggtaaagttgaaatgctgatttgtttatgttactgtcatgaaggtgtcatgtcttcagattgcctacctttttatatacatgatttcatcatttctgcaatggaaaattgagttttatctatggtaaagtgtagacctcttggctgtgagtcttaaacagcaacatcttcaaaactgtttactgtctttctccttgttcataaaggacttaacctgaaaatagatggtttggataactttatgttggcttatgcatgtgacagttctgtatttgttctgcaaaaggaagcagtgagcaaagataatttgcagtgtagcagaggccatgtgagaggtacacataggctgtgcttcctctgagaaggtgccaacctgccaggctttgctgctgctctgcttctggagatatacttacacaaatacatttgctgtattgccaatacaagaaggatggaggtgctacctaaccaaaagctcaaggcagcctacagctgtaagcaggaaacagaaaaactcattaaaaatttggtaagagaaaacgtgagtttccatgccttggaagtagaatgttgaattactaagactggggcagaaacttatttgacagattgcatccatgcagtaattgtgaagcattaggatgcagcgcggcatccgcagtggctgtttgtgtgctgagagcctttaacttgccgaatgtcgagtcaaacagcggtaactgattctctacaggcttaagagaatcctgacacagctctgtgtactcagcggagttggatcagagaagtgcagcaagtcagctgcagtctccaaagcatctccttcccagtgcttaaacagagccccaaagatgtgtggacgccattggatcccagcacaggccctggcactgctgggcggctcctggacatcctccttaccacagctcacccagatggctgagtgcagcctgaaagcagctgctgctttttaaataagcaactgctttgaatagataaaaactccaattcctctatctcatgtcataaataaacatatttcctgtttacaagagtggatagtgataggacaagggggaatggtcttaaattgggacgggggagatttaggttggatatcaggtggaagtttttcacacagagggtggtgacgcactggaacagcccaaggaggttgtggatgctccatcactggagccattcaaggccaggctggatgtggctctgggcagcctggtctggtggtcgacaacactgcacatagcaggggggttgaaactagatcatcattgtggtccttttcaacccaggccattctatgtcagtaaataagtagctccaagttttaatgtgtgagctatttttgtcataaaaagtgcacattaatagattataaagtttgtaataaaattatatcttgcacgtatgtgtgtcacacataccatgcacatttacacatctttcttcacttctgcttctttgaagctagtacggtgataatgctaaattaaatgtcattggcattaaaagtttaaagtacttgataataagtgctctcaaaaggtgaaatatgacagaaataattacagagcttcagtgcaaacagtgaagaactgtgatgttgcatactgaggaactccatccatactgttatttactgcaattgaggtttttatttattttgagaattaattttgactgatcacctttgctgccactgagctgtcttctcttgtgcagtcttgtggcactgttatgtaaaggaatcccaggccaagtactgcaggcacgtaaatggaaaagtcaagtcaactgattaaactttaaacaggcttttatacgctttaatgtttctgtcttccatgacatattctgtgattggtgggcttgggctttttttggtttttgctttcacacattgaatctgtgtatatgttggaacttactcacacagtgggtcagagcaagcttcacctgaagtcaggagaaggagtgaatacttttgattccctttcattgtaccagatttattcagaagatgcacatgtttcggttttaacctgacttctaatttgtttcttttccatgcataacacatgccaatttcagtctcttaaaattgtgattattttcagttttgtattacattttctctgttaccgtgtgaaaatacaggcttttttcccagcatgctgtttgttgcaataattgcaaattctgtcttgcagagacatgtgacgcagtccagtggtaatcgaaaattcaagtgcactgaatgtggaaaagcttttaaatataaacatcatctaaaggaacacctacgaatccacagtggtaaataaaacaagcgctgaattatgtactaatgctaccatttctactctgtataactttgatgcaatgtcagtcttgtaagtgtaagcttaaaatactagggctttcctttcgctttctctaagactcagtacctactgactgcagccttcaactgtgcacagaaaatatgtaggataactcaagaggatttacatttgcaacttgagctctgatatttaaggaagcttcacacgtggcagaagaaatggggcatctttctggtctttctcgcttgtccgttttttctcagcgtttgcagaccacttagctagttgtgagccttgctagaaaactttaattgatagcaatcagggtatagcaactatacttccttactgtggctgctattttccccagtacatgatgataaaaatagcctcagagcacaaatgtgagattgtcatacccatcccagtggcttcaatttataaataattaacttataatgttatatatttataaatactatataataataagtaagcctcaatttctctgtttgacccaattttactcactagcagtaagtctgaaaacaaggtgttgggccatcttttcctttcttattggttgctcagccatggtaatagcaattaagtgcacttagaagcccttcctcaggaaacctcatcttcatttcatttacacagagcagtggcatctgctcctgtgcatgggaaggcattagccaacaggcttttcagtccaacacaggttagctgttctttttccttcttttctttcttcttcctctgtaacccagggcccctgaaaagtcacttctgtctgtggctgtcatgattgcatcgttgtatgcatcttcccaaccattcagcccggggtacacctctgaaggcaaatgttcagctgctttatgcatgtgtctagtttccctcaactcttcatttaattatgatttgcatttatgccacttatagttcttctttggttaagcatatctatgtgttgttttttttctgaagtggcttatgctgcttctgacattagtagtgctgttactggaatggagcttaatgaaatcttcaagtaccacatagactcatttatgtgatatgtagccagttactagaaagtactggaatgtgtcatggtcacataggtgccattctgtgtgtactgttgggtcacagtgagacttagcacaggaccctgggatcggagctatagatgatataattgctcttagtcttcggttcactgtaaaggactcttttccctaggactctgaggggtaattttaatatattcttttctaattactattgtttgatgaagctacattgtaacctagcaaactattgcatatgtcttttttctttctttttttcttcttttttgttttctttttttaatctttaggagagaagccatatgagtgcccaaactgcaagaaacgtttttcccattctggttcatacagctcacacataagcagtaagaagtgtattggtttgatgcccgtgaatggtcgagctcggtcagggctcaagacgtctcagtgctcctccccttccctttctgcatcgcccggtagcccagcaagaccacagatacgacaaaagatagaaaataaacccttgcaagagcaacttcctgttaaccaaattaaaactgaacctgtggattatgaattcaagcccatagtggttgcttcaggaattaattgttcgacccctttgcagaatggggtttttagtggtggtagcccgttgcaggcaaccagttctcctcagggtgtggtgcaagctgttgttctgccaacagtgggtctggtgtctcccataagcatcaacttaagtgacattcaaaatgtacttaaagtggcagtggatggtaatgtaataaggcaagtattggaaaacaatcacgctaatcttgcatccaaagaacaagaaacaatcagcaatgcatctatacaacaagctggccattccctcatttcagctatcagtcttcctttggttgaccaagatgggacaaccaaaattatcatcaactacagcttggagcagccaagtcaacttcaggttgttccccaaaatctaaaaaaagaacattctgttcctacaaacagttgcaaaaatgaaaagttaccagaagatcttacggtgaagtctgagaaagataaaaactttgaaggagagaccaacgatagcacttgtcttctttgtgatgactgtccaggagatcttaatgcacttcaagaattaaagcactatgaaacaaaaaatcctcctcagcttccccagtccagtggaacagaagctgagaagcccagctcccctgccccatcagaaactggggagaacaacttatctcctggtcagccacccttaaagaaccttttatcgctcctaaaagcatattatgcattaaatgcacaaccaagcgcagaagagctttcaaaaatcgccgattccgtgaacctaccactggatgtggtaaaaaagtggtttgaaaaaatgcaagctggacaaatttctgtgcagtcttctggaccatcttctcctgaacaagttaaaataagcagtcccacagataacgatgatcaagcagcaactacaaatgagagtgaaccccagaacagcacaaacaactcacaaaatccggccaatacaagtaaatctcagacttcatcagggggatcaactcagaatggttcgcgcagtagcacgccatccccatcaccactaaacctttcttcatcaagaaattcacagggttatacgtacacagcagagggtgtacaagaagagccacaaatggaacctcttgacctttcactaccaaagcaacatggagaactgttggaaagatctaccataactagtgtttaccagaacagtgtttattctgtccaggaagaacctttgaacttaacttgtgcaaaaaaagaaccacaaaaggacaacagtattacagactctgatcctattgtaaatgtaatcccaccaagtgccaatcccataaatattgctatacctacagtcactgcccagttacctacaattgttgccattgctgaccagaacagtgttccatgcttgagagctcttgctgccaataagcaaaccattttgattccccaggtggcttatacgtactctactacagttagtcctgcagttcaggaaacaccaccaaaacagacccaagccaacggaagtcaggtaccgaagcctttgtgttcctgtgctttgtatattatgtgttcatggtgtatccttattaaagttacataaaattgtcaaaataaattaaataatatttagggtgttgaaatgctggaacaggctgtccggagaggctatgcatgccccatctctgaaggtgttgaaggccagggtggatggagacctgggcagcctgagctgctgcgtaggaatcctgcctatggcaggggggctggaactgggtaatctttaagatcccttctaaccaagccattctatgattctgcgattctatgactctgagaaaatgtaagcacaaactatcctggacattattcttgtttgttaaggggtaataaatgtcaccattaacacctctgcaaagctggtcagctcaaacaatgtaggtctagactgacagcagcaatctagttctgtgcatggacaagttagttcttcactaaattctaccattcaaaagggttttctagaacatagtactcaatattttgaggacagcttagttctccggatgaaaaaccagtgtgaagtcctagtgtatatttgttggtggctccttatctcctctttctcaacatccagaaaatgaactgcttgtaaattcttgatactctcttcactctgctgtgctttcttagcttgcagagtagcataatttgtcctacaccgtaatggcactttaaacaaaattcagaagtattttcaattggaactagggtgggtattcaccatactttgttcctgtaccctgttctgttcctttctgagtccttccagacatgacctaaccacactcagtcctgctgagcattacctatgcacatggaggcagggacactgcagaacagaagtggatcacataaagacttagcgtttctaattaaatcttaaaaattgttcacgattttatgcaggcttctctatagccagaaactgaagaaccttgaagatttatgagattgcttgtatgttaaagtttatgagacagacaaaatttcaggtagctaatacatacgtttttatgttcaggcttgataatgtatgacaaaattaattctgatacctctaatgtcagtggaaattactatgctacttagcattaagcttcgtcacttgaaatgctcagaaatagactacagttacaaaacatggaaaagtttttattaatgaaatgtttggaatccccagattttggtttaactaggattctggtacatttgtgaggaggaggatggtcaattatgtaaatgtgaaccatgagtagcttttgtgatgacctggtctaaaaaatcttccattagattgtgaagtagcgaaacgtgggtgacaagcattcattcagaaacgcatttagttatctaatagactctttttttacttctaacactggttaagatactttacaactgcacaaccttattttccttcctaacattacacttattttaagggtcttaaaacacggtatgccaatgtagcttagctctgaccagcagtcatatttttagatgtggtactaagggacgtggtttagttgggaaagactggtggtaggtggatggttggaccggatgatcttggaggctttttccaaccttggtgattctgtgaatatgattacagtcggtcccactggggattgggcatctatatgatggtggggtctacagagcagataggtgcagtgaaagattttgttgactgtgtaagtttaaacaattttgtttgtccatttactgaatggaatgaaataactgtgcagcttcagcttatgttttataaattgtgtgctgcatcagtgcattttttcttgaacccaacctttttgtgctttttcttaaggacgaaaggcaggacactagctcagaaggagtatcgaatgtagaagatcaaaatgattctgattcaacacccccaaagaaaaagatgagaaagacagaaaatgggatgtatgcatgtgatttgtgtgacaaaatattccagaagagcagctcattattgagacataagtatgaacacacaggtatgtactaggaaatgcagtttcagatctttgttttgttgatactgagtaactgataagctcaactgaaattcagttctcagaacacactgtaagaacagggggaagtatagtagtccttattatgatccgtgcccagccttgcttagaacccgtgctttatatacttgtttgacagaactgcaattccgtgtttaaatttgtaagatctaaaccctgaataaaatactgggattttcttccatctggctcatggacagtcatctgtgtgctacagtatgcaattaaggatgtattatttctgatttatcttgcctggttttaaataagaaaagttataaattataaaaaaggactatgtgtatgtatgatactttaccatgaaagccagtgtacctgcatgaaggattctccagttgagccaaacttgtagttatctgaacttactaaacattcgttgggcacggaatctaatctcaaaggaatatcattttggctttggtttttatttctaatttttcataattgttctttttagttccagttctggtatcttcagccttcttttgaatgagtgttgctctcttatttcttcagcgatctcttcaaaaaggcccctgctgcttaattaattgcctacattatgtttctgcatatcaatgtttttatttaattttacttaaatatacagccgaaaacataaaaggctcccctttgtcttcaccatttgtttaaacctctcgacttgtgttcattaagaatatcttctattttcataccttcccactctgagactctctaatcctccttttcataacacagttgtgctttccattctgctcttaaatgaagtgcagtgttcagaaatgctgcttgtttgccatggtgtgacgtggagcacaaccagtgagccgctgtcccattgtctgggtcttttatgtctgggcggaaactctatgtttgttttgcctaacaacttggagtgttggaatcaagataacgtatctgggtccatgctatctttataagagtctctaaacacagcagtgggaaggaagtagtaaagaggtgagtagaaagctggaaaaaagagcaggaagaaaagtagatgaaacaaagtggatttttccagttgatatacgtgtagtcagcaagtttggtacataaggcacctgtcccaggcaagattttggaatgatttgccttttacctttgacatgatacaagggcttgtgcatgaaagcgaacgtgaagctcattgatcttaaatttccatcaggatagaagagctgaaatggttttgagtttcagtaacttttattgcaagaaaaatgcctccttttctaatctatttatattcacacttgttttgtgctctgagttgcatctgagaatctatttatctcttgatgttcatttttcctaagaaggttacaaatacctttgtagtttagcaccgtgcccttgtattcctatgcaagaaacccaggctgacaatgctgagagcaaactgttaaatacaattacttgttgttggcaatacattcaccaacagcatattattatgaaagcagcagcacagagtttaaaatattacatttaaggaatcctttttttttgtttgtttgtttgtttttgtgcttattttctaggtaaaagacctcatgagtgtggaatctgtaaaaaagccttcaaacacaaacaccatttgatcgaacacatgcgactgcattctggggagaaaccctaccaatgtgacaaatgcgggaagcgcttctcacactcggggtcgtactctcagcacatgaatcatcgctactcctattgcaaaagagaggcagaggagcgtgacagcacagagcaggaggaggtgggacaggaggtgctcagcagcgagcatgctggtgccagggcatcgccatcgcagatcgactccgatgagagagagagtctaaccagggaagaagaggaagatagtgaaaaagaggaagaggaggaggaagaaaaggacgtagaaggacttcaggaagaaaaagaatgtagaaaactacaagatgtagaggaggaagaagaagtagaagaagaagaagaagaagaggaagggaaaactgaaggtaacaagaacgatgacgttgtaaatcgagcaagcaatgcagaaccagaagttatacagagcaatgggcaggtgtcagaagaaaaaacaaataaagcttaaatgatagttttttctatatggaaaaaaataaatcagtaatgaagatcgttctatattatacatgcttttcatggaaacacggtagcctgcatactgtgatttctgttcactactgtgtaaaaaaatatatatataaaaaaaaagaaaaaagaaaaaaaaaagaaatccaggtgtgcctgaacctcaaacttagtaatttttcacacagttttcaaagttaggaacaagtttgtaacatgaagcagattagaaaaatacagtgactctggaagcaaaggtttaacaggttgtaggaaacctgatttattagacaagcatctggcattgtttgttttatcagtattaattctcattcttacgttcattaatttttaagctgtacaattgggagagatttatatgattttttttttttttatggcaaaacatttcctaaatccgcttcagtattttattatgtttttaaaatgtgagaacttctgcactacagaattcccttctgcagaaacctctaacagtgcttggctacctttgtaaattcaacctagaaggtagcggttataacattagatgttgtagtagagcatattatcatttaaagtgtattgttagccttaagaaagcagatgatagaagaactgaagtttcttactcatgtggttaaaaatgtagttgaaaagattgttgttgagttctgattgcagggactaacagtgttaataccggtaaggacagcaaagtcgtcaaaatcagtgtttgtaattgtgttttgagtatgtagtaacaatatgaaggatatgatatgaagctttgtatctcctttggccttatgcaagacctgtgtgctgtaagtgccatttatcagtattacaaaggctctcaccggcctttctccaatgcgtggcctacaataactagcatttgttgatttgtatcaaacttctaatctaatcatgggggaaaaaacactcagccatcagagaagtaagaacactggtatctttcattatttaattatttggtggtatttttggttaatacctgacttgcagaatttctctacgataattacaagggaaattttctaatctgctttattgctttatcagtttactttaatttcagacacatacatgacatgttatctggctcataagtattttcaaatgttagttattatggaccccatttattaacaatgttagctgatttttacctatcagtattattttatttcttttagtttatagatctgtgcaacattttgtactgtatgtctccaaacctggcagtattaatacccttcttactgacatatgtacctttttagttttagaaaacttttatatttatgtgtcttatttttatatttctttatttattacacagtgtagtgtataatactgtagtttgtattaatacaataatatattttagtatgaaaatttggaaagttgataagatttaaagtagagatgcaatcggttctcttgcattgagatttgatttaacagtgttatgttaacatttatacttgccttggactgtagaacagatgaattaaaatgggaatgtattaattttacaattgcaatcaattcattttacctttacccagtttttaatataaagctcttaaattttgaaattcactgtgtgactaatagcatgatgctctgcagttttattaagagattagcctaaccataaaactctcatttccttagtaagccaaattagagtaatcttataaacagtgttgggaacaacgtttaacttttttgtgccaatttgttcctgtattcatgtatgtatgttacaaatctgaaacttcatttttaagttccttgttacatcatggtcattttctagttttttaccagactccccatctcacaataaaatacgtcaacaagtctgacttatgtcattattccagtaacttcatgtgactgctgtcagttatccctaccccgtcagtgggacgtgggctgtttccacacggctgctcagtttcggttgtctgcaaggagcgtggaaggaagggaatgttggacgctgtgcaaggcaagggactgctgcattacgttgtccactcctcaaactgaagtagaaaaaaacaagtttctgacacgagccatacgcttctgtgatttttttccctccttagtctgtacaatacacgttttattgctttatttaaacaaggctgctttgaaatgaggtaggcctgtggctgttttctcgacgtagcaataaggcagtgaaaaggttacttctgtgtatcgctgctgagttctccgaaggtacggcaccagcattacagaagtggcttctgtcacctgagtgtgaaggtttgaacgttgcactaaatcttcatttgtacagcattttccagtcgtagcaatgttgagagagtgctatttaagcgaattc

SEQ ID NO: 127 - DNA, 5098 bp, Homo sapiens
  Genbank Accession No. L13856
ggcgcaataacgttacaaattataacactgtggtagaagcaaattccgattctgacgatgaagacaaactccacattgtggaagaagaaagcatcgctgatgcaggtgactgtgaaggtggcatgcccgaggatgagctgccggctgaccagacagtcttaccaggaggcagtgacagggaaggcggtgccaagaactgctggcaagatgacgtaaaagatgatgagtgtgactcagatgcagaaaatgagcaaaaccatgaccctaatgtggaagagttcctgcaacagcaagacaccgccatcatttaccccgaggcacccgaggaggaccagcggcagggcacgccagaggccagtggtcaggacgaaaacggagcagcagatgcattttcccaattgctaacctgcccatattgcgatagaggctacaagcgctttacctctttgaaagagcacattaagtaccgccatgaaaagaacgaagacaatttcagctgctccctgtgcagttacacctttgcatacagaacccagcttgaacgccacatgacatcacataagtcaggaagagagcaaagacatgtgacgcagtctgggggcaaccgtaaattcaagtgcactgagtgtggaaaagccttcaaatataaacaccacctaaaagagcacttacgaattcacagtggagagaagccatatgaatgcccaaactgcaagaaacgtttttcccattctggttcctatagctcacacataagcagtaagaagtgtattagcttgatgcctgtgaatgggaggcctagatcaggactcaagacatcgcagtgtccctcaccatctctttcggcatcaccaggcagtcccacgcgcccacagatacggcagaagatagagaataaaccccttcaagaaccgctttctgtaaaccaaatcaaaactgaacctgtggattatgagttcaaacccatagtggttgcttcaggaatcaactgttcaacccctttacaaaacggggtttttagcggtggtggccaattgcaggcaaccagttctcctcagggtgtggtgcaagctgttgttctgccaacagtcggtttggtatctcccataagtatcaatttaagtgacattcagaatgtacttaaagtggcactagacggtaacgtaatacggcaagttttggaaaataatcaagccagtcttgcatccaaagagcaagaagcagttaatgcttcatccatccagcagggtggtcattctgttatttctgccatcagtcttcctttagttgatcaagatggaacaaccaaaatcatcatcaactacagtcttgagcagcccagccaacttcaggttgttcctcagaatttaaagatagaaaacccagcccctacaaatagctgcaaaagtgagaagttaccagaagaccttactgttaaatcagaaaaggacaaaggctttgatggggctgtggatggtagcacttgccttctgtatgatgattgcccaggagacctcaatgcacttccagaactaaaaaagcactatgacccagagcaccctgcccagcctccaccccctgcccccgaagccgagaagcccgaggcctctgcttcatcagccagggatggcgatttgtctcccagtcagccacctttaaagaacctcctatcgctcttaaaagcctactatgctctgaacgcacagccaaactcagaagagctctcaaagattgccgactctgtgaacctacccctggatgtagttaaaaagtggtttgaaaagatgcaagctggacagattccagggcagtctcctgagccaccgtctccagaaacgggcacagtaaacatccctgcaaagagcgatgaacagcctcaacctgcagatggaagtgagccccaggaagacagcgcaagtggacagagtcctctcaagatgactagctccccggttttaccagtaggatcagccatcaatggttccagaagttgcacatcacccccatcacctctaaacctttcctcggccaggagcctgcagggttacttttgtgtggcagacggtgcccaggaggagccccaagtagaacctcttgatctctcactaccaaagcaacagggagagttactggaaaggtcgactatcagcagtgtttaccagaacagtgtttattctgtccaggaagaacccttgaacttgtcttgtgtaaaaaaggagccacaagaggacagctgtgttacagactcagaaccagttgtaaatgtaatcccaccaagtgccaaccccataaatattgctattcctacagtcactgcccagttacccaccatcgtggccattgctgaccagaacagtgttccctgcttacgtgcactggctgccaacaagcagactattctgattccccaggtggcttatacatacgctactacagtcagccctgcaatgcaggaaccaccggtgaaggtaatccagccaaatggaaaccaggatgaaaggcaagacactagctcagaaggagtctccacagtggaggaccagaacgactctgactctacaccacccaaaaagaaaactcggaagacagagaatggaatgtatgcatgtgacctatgtgacaagatatttcagaagagcagctcactgctgagacacaagtatgaacacacaggtaaaagaccccatgagtgtggaatctgtaaaaaggcatttaaacacaaacatcatttgattgaacacatgagattacactctggagaaaagccctatcaatgtgacaagtgtggcaagcgcttctcacactcgggatcttattctcagcacatgaatcaccgctactcctactgcaagagagaagcagaagaaagagatggcacggagcaggagcaggaagaggctgggctggaagccctgatgaatgagcatgtgggtgcgcgggcatctccctcacaggctgactcggatgagagagaaagtttgacaagggaggaggatgaagacagtgaaaaggaggaagaggaggaggaggataaagagatggaagaattgcaggaagaaaaggaatgtgggaatgcacaggcggaggaggaggaggaggaggaagaggaggagatggatggagccaaggatgaggcagcagccaagactgatggtgccgtggagaatggggctgctccgcaggcaggcagcttagagcagaaggcaagcgagagcagcgagcaactgtcagaggagacgacaaatgaagcctaggagctcttctagaaggaaattctacttggtaatgaaatttgctctatattacccacgcttttcatggaaacacggcccctgtgccgtggttcctgctcactactgtgtaatgtcagaactgaaaaaaaaatacaaaaaaaaaaatccgggtgtgcctgaacctcagacctagtaatttttcatgcagttttcagagttaggaacacatatgtaacatgaagcagaatagaaaacttcagagactgagaagcaggtttcttagcaggttacagggagctggatgggcatctggcatggttatcagtattatcactcttacgttggttcattcttaagctgtacaatgggagaaattttataatttttattggtaaacatatgctaaagccgcttcagtattttattatgtttttttaaaatgtgagaacttctgcactacagaattcccttcacagagcagtagaaagcagttccaaccgtgctgactacctgttaccaagtcagtcaggaggtaggacctctacgttagacgccatgttgtcatttaacatgtattgctagccttaaggaagcagccgagagaagaactgaagtttcttactcatgtgattttaaatggagttcaaaggttgtcgttgagttctgactgcagggacgaacagtattgatgtggtgaggacgacagagtctgcagaatcagtgttcgtgattgtgtttgcgtacgtggtagcaactatgaaggatctataggaagcgttatgtctcctttggccttaagcaagacctgtgtgctgtaagtgccattctcagtatttcaaggctctaactgccttcattcagtgtgtggcctacaataactagcatttgttgatttgtttgatgtttcaaaattcccaaacaaaactcaaaaccactgactctgtcagagaagctgaagcactgggacatctcataccttggttcctcagtattcattttacgttgattgactttcggaaatctctacagaaacaaaagggaaattctctaaactacttaatccatgtactttcgtgtcagacatggataagccattagtatttggcttacaaccatttccaaatgttagttattacggacccagttgatgaacaacattagctgatttttacctatcagtattattttatttcttttagtttatagatctgtgcaacatttttgtactgtatgtcttcaagcctggcagtattaatacccttcttactgacacgtacttttagttttagaaaacttttatatttatgtgtcttatttttatatttctttatttattacacagtgtagtgtataatactgtagtttgtattaatacaataatatattttagtatgaaattttggaaagttgataagatttaaagtagagatgcaattggttctcgtgcattgagatttgatttaacagtgttctgttaacatttatactcgccttgggctgtagagcagagtttaaatgggaatgtattagttttacaactacaatcaagtcattctccctttacccagtttttaatatgaaactcttcactttgaaactcactgtgtgactcatagcatgatgctctgcagttcttctgttaagagttggcccagccataacccattcccttagcaagccaaattagaattgccttctgtaaacagtgttgggaacaatgtttaacatgttgtgccaatttgttcctgtatccatgtatgtaagctaccaatccgactcttccttttaagttccttgttacaccatggtcattttctagttttttaccagactccccagctcacaataaaatgcatcaacaagcc

SEQ ID NO: 128 - DNA, 7661 bp, Homo sapiens
  Genbank Accession No. AF012923
tttgacaatcagcctccagcagcggacggccggtcggcggcggcgagcgcagaaagtggtcttggagcgggcagcggcgcgcggggtggcggggcggctgcggcctgccggttccggtttgaagactccatcccttgtcacccacgggattatgcttgtggctttcctgcctgatgattcttttgcagcaggtctggcttcctttacctaatcggccttcaacctctcctcctatgtcagtggctgccaggtccacaaggaccttgcagctcccgccacagaaggcttttgggcaggaagcatccttgcctctggcaggggaagaggatttagctaagagaggggagccagactctgccctggaggagctgtgtaagcccctcttctgcaaactctgcaatgtcaccttgaactccgctcagcaagcccaggcacactatcagggtaaaaaccatggcaagaaactacgaaattattacgcagctaacagctgtcctcctccagccagggtgagcagcgtggtggcagagcctgtagccacacccctcgttcctgtccctccgcaggtgggctcctgcaagccagggggcagggtgatcctggctacagagaatgactactgtaagctgtgcgatgcctccttcagctcccctgccgtggcacaggcgcactaccaggggaagaaccatgccaagagactccgtctggccgaagctcagagtcactcattctcggactccgcagaggcagggcaacggcggactcggaaagaagggagtgaatttaagatggtggccaccaggaggaatatgaatccagtccagagcaattcaggcccttacttcaatgcccgctcccggcagaggatcccgcgagatctcgccatgtgcgtgactccaagtggccagttttactgctccatgtgtaacgttggggctggcgaagaggtggagttccggcagcatctagagagcaagcagcacaaaagcaaggtgtccgagcagcggtacaggagcgagatggagaacctgggctacgttcagtgatggccgtcctcacagagaagcctgtcctgcctgtttgccttctgtcgacctgccttgctttgtggtcctccatgcgtacattcctcatttctctgcttagtgcgagtaacctgcagcggtgccagagccgtcaggtcggggtcggggagggaggtgcgtttctttggtcaccaggatgctcttttgggccaactgtgtcaaacaactcacagtgagctttctgccccatcggtgtaacttcttatcttggccaagttctggttaagcagcagtagcctgactagagctacgattatttaaaaatggcatctacttttgcggttttaggtttacgcacattagaggaattgacttgagttcttacttccaattatagagaaaacaggtaaacagagattcccgttttctgatgctcctgggaaccattaccaccacagtgtggtgtctacaagatgtgctgttagggtgtgtgcctgggtctcccagcagctcctggttccctgtggcatatccctcctcccgccccccctccgtaattaacacataggtttccttgaattcatatacgtccagaatactgtgttcttctgaacatgtgacttcatctccagttgtgaaccatacacatgtaattctcgtccgtctctttccctgcttggatcagcttctccactcgctcaccccatcctcatggcctcgcttgctggcagttttggagacccagatttgactgtctaatgagttgaagatggttattcttttagaaaatatattttcagatgattcgaggatgtgtttgagatttcaatttggaattctattttcactgatgattatgtgacctcatgggatagtcattttgtggcttttgacgattgtatcctgacaatgccctgacaggtaatgggcatgcctggaaaatacccctgcctttttctttctttctttctttctttctctctctctctctctttctttctttctttctttctttcgcccctccctccctccctccctcccttccttcttttaaaagctgatcaagtctcagtgtcatttctaatagcaaaacgccaccattgcatcttctccttggcctccttgaagagactttgaaaacacagatgactttggtgtctaatgattataatgggattcttattttttaaataaaaagccatagtgtatgtctagacagactgatggagtgttaaatgtgaacttgtgttcactgtgtgtcctttgtcctttttccttcacatgtgtaagaccagcatgcccgtgctccttagggaagcaagcgtgcgtctgcagaaggcttagggcaagcaggattttgcactataacaaatacatatttcattactcagtcacctgagaattctccgggcagatggagagggaggaaatgctcagctgcctcttctctctccattgctgctttagagtagtcgagacccataattaaaggttaattttgtgattgctggcttctggaacggtagagctatgtggctaagtatttcccttcagaaacagaagacagagcagtgttagcctcagacttgatctccattcgcaactcctcacaccaggaacccctcctgcvgccatctacagagctggtcagtttaaggcgacttagggtgtatcttgttagccatttggttgctcattttgctgcaaaatataattcttcgttagacttaaatatactgctggccacttggttctgtgattgtttaactgtctcatctgttctctgcagggtatgcgtctgtgtgtctctctgtatgtgtctgaagatacataccctccccccccaaaccccccccccttttacatgatagcccagagagaatttcacctcatttttatctcagataccattgaaagattctgggtatggagttacattttataaaagtgatattcatgtgctttgagttttttccctctgggaatcaagtcaaaggatgtttctccccggcccccaaatacccccctcctgtatatacagaaaacagtggacttaagggcttggtgtgttctcaagccttgtgaattcaggtttctagtctcccagtgcccttaatggatgttagggacgtgtaggcgtggtttcttttagagtgaaacgttagatttatagtgtcacttctgtatttctttgcactagagagagtgatgctttggttttatgacactccagtgccaggctacctgtgagaactcggtttgtttctgaactctgcaagtctttaagtagctgctatggtcattgatagaggtgctgtgggtttccgaagcatttggaagttccctggctgaggctctgttgtctttacttgtattcggtgggtagggcagaggccatcagaactgcacggtgcagtttctcactaagcgaatgctgtctggacagtgtcccttccttgtctgatcaagctatggcggcatcagagtcagtcaggcgagctacctgttggcttcattttgctgtaggattggaccctcgttccccaggaagcctgtatattatggtgtgttacagtcatggatggacagagtgtagacaaatggagaccttagtccaaaattaaggagatttcagtgtcatcaattatttgtagcattgaagtctgttcttgtggctctctgctgcgcttctttttttgtttgttttttgggtttttttttgtttgtttgttttgtttttttgtttgtttgagacagggtttctctgtatagctttggctgtcctggaactcactttgtagaccaggctggcctccaactcagaaatccgcctgcctctgcttcccaagtgctgggattaaaggcgtgtgccaccaccgcccggtggctctctgcttcatgatgaagccagtcagaacacccagagcccaggcttcaggaagagtctggtttcagtcagatggtctgcatcccacatgccttcagagggcattagcttttgaagttcagctaaatccctgtgtgctttgaccttttagactttacattgagacgagactttgctggtctgagttgatctgtgtcctgccgcttgtaaatgcatgcctattgtcttacgcctgtctgcttgcctcttaccaactgaattctgcattttccacagtttttctacactatttgccttgataaaaagctccccctcatattcctttttagtttgccatgggcttaaagaattagtgaggaggttcgaagccctggaaatggatgaaggaccgtggtggctgagagcctgtgatctgctgaggtgactctcccaccttaccccacagagctgcctacagagctttgtgtagccctcggtctacaaccttgcaatcccaataggagaaaaccattaaacgtacatacatgtacctgattacgtcttcctgtgtagacaggatctaagagttaacagcgggacttggaactgtcccagcctgtgtttccagggagtgtgagcaatggcagcccaagggcagacaagtgacttcctcgtagtgctttctttgcagagaggctcaaggatagcaggtttggaatgttgtgtaaatggcagaacttgggccgaaggaatttaccagagaaattggtggactgtgtacccaagtggtggagtgtctttagaaatggggaaacatttttgttggatgcagaagtttaatgtagatatttgaacaggtgtttgaaaaaaaattctaccttgctccctaccccttaaacctttgttaggagttttatatttgattagggaaaaaaatgctttgttgcttttgggttctgtttgggcgagtctcctgtgagctgccgtgtcagtgtagctgagtgaacactagctgtgtaaatagcttctcatgagacatttatatggatagctgtgtggtgtttccttccattatcaatagggactctttgtgaacgccctttctctgtagctaccaaaaaaaaaagtcctggcttatggtcccatgtgaccttgtgtccgttaaacccagaatatgagtgcctttagcaagtgttagcatttcacagagggtagagaagacaggatttactgccattaaccactgttcattaaatagcttgaaatatcaacggtccttgtgaattctgctctgtgtctgcctccctctctccatttcctagtgcaatctcaatttgcttttgggtgaagtgtgcactctgggtgggagcctggctgctgaggctggcagtagtcatctctgtgcctgtgtttgatgccactgaggactcagagcttgagatgctgatgtggaagcaaacgtcctacagtgaccgcgctccggcttggttcttctgtagagtggagagaattatgtatacaaacagactgtagctctgggtggtgttgtacttcgtctctgcgtggatagagggacctttttaagcaagttggaggcctttgaaaatgacagtttccttccttcgattagctgaaaatattaaatttcctgcggtctctacaaccttccgaacatacgattaaaccaattttcatgtagaaatagtaacatttgcctcagaatttcattatgaagaattttggacatttgtcaaagtggaaaacattttggagcacacctaactctatctcctactgttgacatttccctactccgggtttcctcacgactcccatgagcccatcgctgtgtcttctgtctgcccatcaggacagatggctctatacatttcagacagcgtcccatccatgggtgtcatacactaggatttaatattcacatgttaatgtcttaggaagacagcatgtgtaggtcataacctgaggcagtaagcagtctctgtacyctcctgtggatagcagttccttgtttctgttcttgagtgtgcttagggtttccaacaagtccgtaccaggttacgtggcccacaaacgttacgttcccgacaggacttgctgtgaactcccaggcgctgtaaccactcgcctcctatgcctgtacatagcaggattaaactctgagacaacagtactgtctactgagggctgggcaagccttaggcagtctacagcctcctccagtcatgtcggagagaactgcggtctgcctccatcctctgcccgcctcctgtggccagcgctgcagagctgaaggggtttgctcaggttggataggttggatggggagaaccaaatcacaatccaacctgagtgcatttaagttgtaatcttaggcttccagtgtaaccgaacaccttccttttgtgcccttagaaggactgtgtttattttttaccaactagaattttagttttagacatttcacagttctcttaacacagagatattcctgtgggtatttgttgttttgtgatgttcccatgtagctcaggtgagtcacttctactatgtagccaaggctgaccttgaactcccccgatcctcctgcctccacctcctggtgctgggattacaggcatgtaccaccatgccaagctatataaattgtagttctaattgagtccaaagcaattgctaaaatctcactgcactgttgagcaccaactcatgcagggtctgtctgattgtttttgtctttaaatggcttttatgaccactctggctacgtaagtggtcacgtgacccccctccccccaccccttcgtgaaaatggtgttctccatcactgacccctctcatgcactctctacctgatgctttttttgttggttttaagaaatgactccataagtcagggtgagcgatactgtcttaggcaggcaaagcctctcgggagcaaaccctcctggacgtggctggtcgttgttctgccttctttcagtatctgatcacccaccaaaggttctgtaagccagtgtgtcactttgtaagtctcacgttgactctgctcacctgtggccccccaccccccacccccagtcaactgtagtgacctggcataggttttgtgtgttgccttcgaaatgccttattgggtatgccaggctcctctgtcaagcatcccagctgtctgctgagacatacatgtcctctctggggtatgtgctcttgatccagaagcaaagctgatcttgctttcagtgtcaagggtgcgttttaattcagttattgtcttaagttagaagtgaagcaggaagccgagagaatgtgaacctttcacgtgatcagtgtggcaaaccgaaaatgtgcttttgctgttcactagaaagaacgcagctaagaaatgccagtccaaaccggaaagtggggctgtgtcatatcacgctccccacttgtcacttggccgttgagtgtctgagcaggccaccgggcagtgggccagtctatgttctggggctacagagctgactgacgtcacaggattcaaaccaatcaactgtgaattgtgaaattgaaattgctcttttggtttttatttccttcagcctaataaatacagaagtctgaatgttatttaagcttagaccacttacgttggctcatcttggctgtgtattctcatgtatgtactggtttctgataaaggcttgatgacattgtaacgggctttttgtgttcagttcaataaaacagtttctgagtcttgtccc

SEQ ID NO: 129 - DNA, 508 bp, Homo sapiens
  Genbank Accession No. N21464
cagacaagactcagaaaccgttttattaaactggaacacaaaatgcgtgttataataatgtcaagcctttatcagaaatcagtacataagtgaggatacacagccaaaatgagccatcaacaaaagcagtataaattttaaataagtttcagatttctatactcaatatgctaaagaaaataaaaccgaaagagtagtttcaatttcacaattcacagttgattggttttaatcccatgacacgtttgtcattctgcagccccagaacacagacttccaaagcagtgactggcactccgacccaacagcatacacagatcttaagcctctgtatgacatttagagaaaattttaataaacaaccctaatttacacacagtttgggctgacattttttagctatatcctttatcaaagatagttctagtgaaatagcaaaagcagttttaaaagtttgccatgccattcaataaagggttctaaagcctcccttggttttacattttat

SEQ ID NO: 130 - DNA, 449 bp, Homo sapiens
  Genbank Accession No. AI081618
ttttccgtgggatgtattttttaatgagaacacattgttatactctgagtacgtggcattcttgcttgatagaaacatttacaaggacacatacacatttatatccaaacatcaaatgaagtagatattttaaatgaccagttcgcacaagaaataaaatatattatacaaaacatgggttatatccacagtcattagttctccttttctacacaaaacagcaataaattaaatcacattatatgcaaatagttagttgtacattagaacaataaacagtatgtaacgtgtgcagcttttacttttacttttctaccagactcatgatagatttgtactgtttggtagtcctgtatttaaatcaacaatgaataatgtgacccagaagacaggggtcacagaattggtctgtcacaaggtctatcccatgtcctcttggtttcaattat

SEQ ID NO: 131 - DNA, 145 bp, Homo sapiens
  Genbank Accession No. AI869864
ttttttttttgggatgcagcactttctttattgcccatccagggaacagccaagccagctccatctgcattctggctgcagcgtgtacattaggggactcaggggccacagtgtgggaccgtgcacactggcaaggcactggcgg

SEQ ID NO: 132 - DNA, 334 bp, Homo sapiens
  Genbank Accession No. AI769341
ttttttttttttttttaagtcaaaaatgcttcctttattacataaagccaatactgctacttctaagttcaactgtttgtgcatctctatatcgttcaaagtgttacgcccgtgatattaacaatgaccgcttccaagtgtcagtgaacagtggctccctgtgagtgtcatcatggtacctctccccattgcacacaagtcaacaaactgctctagaaagttaagttctcccaggcccagagtaaacatatactcaatattcttccatactttattataccataagaagcaaacttctgaaggagatacaattaaagataccacagcctcgtgc

SEQ ID NO: 133 - DNA, 428 bp, Homo sapiens
  Genbank Accession No. AI343901
ttttttacttttagttcacattttttaatggttaaaaactatgttaacagagcagttatagaacagaacttcttatatttctttatttacaccacactctgaaaaaaaaaacccagttctatttgattaactatgaatagcaaagttttgtgacttgtgactcacttaaatcacccatctgaaattcatttacaaggtttttacattaataaaacagtagtgtggtacatgtattggactcagatgaagtctaaagtacactggactctagagagtggattacataccaacgaccaagattcaagtgtttggggaaaaaaataccttagacagtctatgttggcgtcaacactaaaataaaaggcaaacatgcaggactttcaaagcttgattagataatggttctttgttttctttccttcaaattt

SEQ ID NO: 134 - DNA, 473 bp, Homo sapiens
  Genbank Accession No. AA808622
tttttttcctagatacaattcctttattatcattatcatgccccctagcacatgaagctgggcttccacctagatcagctaaggacaggggtatgtttacaatgagaacaatttctctatgcgcattaggttaagacctcttctctgtttctagaatactgtgatgactcacatccatgggccagctgcttccaggaatccatctggcctcaacaacattgggctgcctggaataacggctggcacttgcacagggcagggtatggggagcaggcctcaggtttataagcaggactgggcactgctgaaataggggaagggggcagccaacatgtagcaggttctcccaaggcatgtagaagttggtgggaaaatggggctggggtgtgtaacttgtccccttccaggaagggacccaggcacctggtctcctggccaagatcacaggcgatccaagagtcctccagggaaga

SEQ ID NO: 135 - DNA, 282 bp, Homo sapiens
  Genbank Accession No. AA564610
ttttttttttttttttttttttttaaatgtcatagtgtttactttatttaaatcctgaggttaaaaataaagtatttccacatggcatggcagacactataaaataatatgcttagggatacaaaagttttccacccccattgtgcaggtggggtgctggtatttgatgtgcttctagataattctttggcagataagaatgaattggggtcccagacccaccatcccgtaaggccacatgaattgaggattaatcaattaaagtgcaattccaaatgttga

SEQ ID NO: 136 - DNA, 478 bp, Homo sapiens
  Genbank Accession No. AA722810
tttttttccaaagaattgtaaaatttattgtataagtattgcagcttttcagaatgtcatcattgccactaatgattactgatacacaacaagcagtttcttcaggcctgtggattggcatccaaatacagagtcttacgcagcggggacgtgggtgcgcgccccgcatgccacggaaagcttacataagtttaacttgaacagagcttgggaaatggggctgcaaaggagagcagttcccacgccaggaaccaacgtgaaagcattggaatcagcacaacagccatggaatcaggcaggcaggggaggacgggctgtgtccttctgagctctatagtacagcaagatttcaagcagtttccagaaaaacaacaacaacgacattttctttccttatcgacgggatattttatggttccggaagcttcgtgttgcacataggaaaaaaaatttctctgaaacgtacaattcataggga

SEQ ID NO: 137 - DNA, 470 bp, Homo sapiens
  Genbank Accession No. AA417890
ttttactttgtaacaaaaatttattaggattaagtcaaattagaaaacttcatgctccaccacttgtcatatttacctgaaatgacaaagttatacttagcttgagtgtaaaacttgtgccccagagattctgtttggaaagcaaaaaaataattgatgcacatagcagtgtgcctgataccaccacagtgaatgttgtttaaggcctaacaaacagtggtcagcaaagcatacattacttttaagctttgggtccaaggaagatgtcattccctacctccttcaaaagcagactcatcatagcctgggcacctaggcctggagcctattttttcgagtctaatatgaacatctggatttcaagaggtgctaggcttgaggtatctttatggcttaaaaggcacaggtcatgcagctgaattaaaagctatcatgttggtctctggaatgcaggccatgagccacgcctt

SEQ ID NO: 138 - DNA, 5759 bp, Homo sapiens
  Genbank Accession No. D50683
ataccctgtggtgctagtgtaaaatcaaatataatctacctctttagcttttctgttatgtaattggaatgaaaaaatagtgcttttttttttttttcatttttgagattgagttaccatggagggaaagaacatgtgttttaccagtggaacgcattctttgtgttatctcttcgatttttaacattttatgtttccagtttataaactttgcctccagtttgatgaagaaaatttagctattagaaagtatttaaaatctcaaaagtatgacattttaaaatgttagcaggtttaaagataacttagtttttcaactcttaacccaaaattatacttgtatactataatttgtgttgaattacttggtattatttatcatcctagtaagatctattttatataatttgattcactttttatattgaattatgttaattgtttttgtaatacacctttcatatttcttcaaagaaaactagtgttgggttattgctaattttgcttcgtggtttggttatttacatataaaaattatattgttttaaaaattgcaaagtgatcatttattgacacatcagcaagaattaatgttgaaatgcaagttttttcccctatccttaactaagtgtgtagatatctttgttttgtttctttaatagatagcaaacaataaagatgcattgaggaagacatggaaccctaagtttacattgagaagtcactttgatggcatccgagcccttgctttccatcccattgagcctgttttgataacagcatcagaggatcacacattaaaaatgtggaatttacagaaaacagccccagccaaaaagtgagaatattctactttaacattatttgaatattttaagtaacattttcagcagaaaactacatattttatgatttctgttaaatttcccaaacatttcttctagttctttcttccatgtcatgtaatttattgtgtttttccatttatacaacctaatgctaggttagaaaactgatgcttaggaagatatggtattatcttttggtttcaccagggtttgtgaatactgattacagtctttatacataacagtatttttaaatggctgctatatttggggagccccttgtctatactgaaggtttggactgttcttgtaaacaggtatatgcatctttaaaataatcaaatgtccacctccaccttgccccattgtttactagatttagacttatgagatggagcagagaaaagcctcactgggatgggtggagggtcttggtcttgtcttttggccttgagactttaggtactttccatacccaccaatatgtctagactcagaggctaacatgactgctagtgctcaccttggccctttagttcctgtctaagcatggatagacatgagttagtataaaccctttaaaagtcacaaagctaaatctggttctacttgcttgggtccttatcggagctccactcctttgggtcacatgtcaaaaaaaaaaaaaaaaaggcgccgtccgctgcgctgggggctcggtctatgacgagcagcggggtctgccatgggtcgggggctgctcaggggcctgtggccgctgcacatcgtcctgtggacgcgtatcgccagcacgatcccaccgcacgttcagaagtcggttaataacgacatgatagtcactgacaacaacggtgcagtcaagtttccacaactgtgtaaattttgtgatgtgagattttccacctgtgacaaccagaaatcctgcatgagcaactgcagcatcacctccatctgtgagaagccacaggaagtctgtgtggctgtatggagaaagaatgacgagaacataacactagagacagtttgccatgaccccaagctcccctaccatgactttattctggaagatgctgcttctccaaagtgcattatgaaggaaaaaaaaaagcctggtgagactttcttcatgtgttcctgtagctctgatgagtgcaatgacaacatcatcttctcagaagaatataacaccagcaatcctgacttgttgctagtcatatttcaagtgacaggcatcagcctcctgccaccactgggagttgccatatctgtcatcatcatcttctactgctaccgcgttaaccggcagcagaagctgagttcaacctgggaaaccggcaagacgcggaagctcatggagttcagcgagcactgtgccatcatcctggaagatgaccgctctgacatcagctccacgtgtgccaacaacatcaaccacaacacagagctgctgcccattgagctggacaccctggtggggaaaggtcgctttgctgaggtctataaggccaagctgaagcagaacacttcagagcagtttgagacagtggcagtcaagatctttccctatgaggagtatgcctcttggaagacagagaaggacatcttctcagacatcaatctgaagcatgagaacatactccagttcctgacggctgaggagcggaagacggagttggggaaacaatactggctgatcaccgccttccacgccaagggcaacctacaggagtacctgacgcggcatgtcatcagctgggaggacctgcgcaagctgggcagctccctcgcccgggggattgctcacctccacagtgatcacactccatgtgggaggcccaagatgcccatcgtgcacagggacctcaacagctccaatatcctcgtgaagaacgacctaacctgctgcctgtgtgactttgggctttccctgcgtctggaccctactctgtctgtggatgacctggctaacagtgggcaggtgggaactgcaagatacatggctccagaagtcctagaatccaggatgaatttggagaatgctgagtccttcaagcagaccgatgtctactccatggctctggtgctctgggaaatgacatctcgctgtaatgcagtgggagaagtaaaagattatgagcctccatttggttccaaggtgcgggagcacccctgtgtcgaaagcatgaaggacaacgtgttgagagatcgagggcgaccagaaattcccagcttctggctcaaccaccagggcatccagatggtgtgtgagacgttgactgagtgctgggaccacgacccagaggcccgtctcacagcccagtgtgtggcagaacgcttcagtgagctggagcatctggacaggctctcggggaggagctgctcggaggagaagattcctgaagacggctccctaaacactaccaaatagctcttctggggcaggctgggccatgtccaaagaggctgcccctctcaccaaagaacagaggcagcaggaagctgcccctgaactgatgcttcctggaaaaccaagggggtcactcccctccctgtaagctgtggggataagcagaaacaacagcagcagggagtgggtgacatagagcattctatgccttttacattgtcataggataagctgtgttagcacttcctcaggaaatgagattgattttacaatagccaataacatttgcactttattaatgcctgtatataaatatgaatagctatgttttatatatatatatatatatctatatatgtctatagctctatatatatagccataccttgaaaagagacaaggaaaaacatcaaatattcccaggaaattggttttattggagaactccagaaccaagcagagaaggaagggacccatgacagcattagcatttgacaatcacacatgcagtggttctctgactgtaaaacagtgaactttgcatgaggaaagaggctccatgtctcacagccagctatgaccacattgcacttgcttttgcaaaataatcattccctgcctagcacttctcttctggccatggaactaagtacagtggcactgtttgaggaccagtgttcccggggttcctgtgtgcccttatttctcctggacttttcatttaagctccaagccccaaatctggggggctagtttagaaactctccctcaacctagtttagaaactctaccccatctttaataccttgaatgttttgaaccccactttttaccttcatgggttgcagaaaaatcagaacagatgtccccatccatgcgattgccccaccatctactaatgaaaaattgttctttttttcatctttcccctgcacttatgttactattctctgctcccagccttcatccttttctaaaaaggagcaaattctcactctaggctttatcgtgtttactttttcattacacttgacttgattttctagttttctatacaaacaccaatgggttccatctttctgggctcctgattgctcaagcacagtttggcctgatgaagaggatttcaactacacaatactatcattgtcaggactatgacctcaggcactctaaacatatgttttgtttggtcagcacagcgtttcaaaaagtgaagccactttataaatatttggagattttgcaggaaaatctggatccccaggtaaggatagcagatggttttcagttatctccagtccacgttcacaaaatgtgaaggtgtggagacacttacaaagctgcctcacttctcactgtaaacattagctctttccactgcctacctggaccccagtctaggaattaaatctgcacctaaccaaggtcccttgtaagaaatgtccattcaagcagtcattctctgggtatataatatgattttgactaccttatctggtgttaagatttgaagttggccttttattggactaaaggggaactcctttaagggtctcagttagcccaagtttcttttgcttatatgttaatagttttaccctctgcattggagagaggagtgctttactccaagaagctttcctcatggttaccgttctctccatcatgccagccttctcaacctttgcagaaattactagagaggatttgaatgtgggacacaaaggtcccatttgcagttagaaaatttgtgtccacaaggacaagaacaaagtatgagctttaaaactccataggaaacttgttaatcaacaaagaagtgttaatgctgcaagtaatctcttttttaaaactttttgaagctacttattttcagccaaataggaatattagagagggactggtagtgagaatatcagctctgtttggatggtggaaggtctcattttattgagatttttaagatacatgcaaaggtttggaaatagaacctctaggcaccctcctcagtgtgggtgggctgagagttaaagacagtgtggctgcagtagcatagaggcgcctagaaattccacttgcaccgtagggcatgctgataccatcccaatagctgttgcccattgacctctagtggtgagtttctagaatactggtccattcatgagatattcaagattcaagagtattctcacttctgggttatcagcataaactggaatgtagtgtcagaggatactgtggcttgttttgtttatgtttttttttcttattcaagaaaaaagaccaaggaataacattctgtagttcctaaaaatactgacttttttcactactatacataaagggaaagttttattcttttatggaacacttcagctgtactcatgtattaaaataggaatgtgaatgctatatactctttttatatcaaaagtctcaagcacttatttttattctatgcattgtttgtcttttacataaataaaatgtttattagattg

SEQ ID NO: 139 - DNA, 2599 bp, Homo sapiens
  Genbank Accession No. X86163
cagattcacaaactgcaggactgggcagggagcagacagtgagcaaacgccagcagggctgctgtgaatttgtgtaaggattgagggacagttgcttttcagcatgggcccaggaatgccaaggagacatctatgcacgaccttgggaaatgagttgatgtctccggtaaaacaccggagactaattcctgccctgcccaattttgcagggagcatggctgtgaggatggggtgaactcacgcacagccaaggactccaaaatcacaacagcattactgttcttatttgctgccacacctgagccagcctgctccttcccaggagtggaggaggcctggggggagggagaggagtgactgagcttccctcccgtgtgttctccgtccctgccccagcaagacaacttagatctccaggagaactgccatccagctttggtgcaatggctgagtgcacaagtgagttgttgccctgggtttctttaatctattcagctagaactttgaaggacaatttcttgcattaataaaggttaagccctgaggggtccctgataacaacctggagaccaggattttatggctcccctcactgatggacaaggaggtctgtgccaaagaagaatccaataagcacatattgagcacttgctgtatatgcagtattgagcactgtaggcaagacccaagaaagagaaggagccatctccatcttgaaggaactcaaagactcaagtgggaacgactgggcactgccaccaccagaaagctgttcgacgagacggtcgagcagggtgctgtgggtgatatggacagcagaagggggagaccaaggttccagctcaaccaataactattgcacaaccacctgtccctgcctcagttcccttttatgtaacatgaagtcgttgtgagggttaaaggcagtaacaggtataaagtacttagaaaagcaaagggtgctacgtacatgtgaggcatcattacgcagacgtaactgggatatgtttactataaggaaaagacactgaggtctagaaatagctccgtggagcagaatcagtattgggagccggtggcggtgtgaagcaccagtgtctggcacacagtaggtgctcattggctcccttccacctgtcattcccaccaccctgaggccccaaccgccacacacacaggagcatttggagagaaggccatgtcttcaaagtctgatttgtgatgaggcagaggaagatatttctaatcggtcttgcccagaggatcacagtgctgagaccccccaccaccagccggtacctgggaagggggagagtgcaggcctgctcagggactgttcctgtctcagcaaccaagggattgttcctgtcaatcaatggtttattggaaggtggcccagtatgagccctagaagagtgtgaaaaggaatggcaatggtgttcaccatcggcagtgccagggcagcactcattcacttgataaatgaatatttattagctggttggagagctagaacctggagagctagaacctggagaactagaacctggagggctagaacctggagaggctagaaccaagaagggctagaacctggaggggctagaacctagagaagctaaaacctgagctagaagctggaggactagaacctggagggctggaatctgaagggctagaacctggagggctggaatctggagagctagaacctggagggctagaacctggagggctagaacctagaagggctagaacctggagggctggaatctggagagctagaacctggagggctagaacctggagggctagaacctagaagggctagaacctggagggctagaacctggcaggttagaacctagaagggctagaacctggagagccagaacctggagggctagaacctggaagggctagaacctgtagagctagaacatggagagctagaacccggcaggctagaacctggcaagctagaacctggagggaatgaacctggagggctagaacctggagaatgagaaaaatttacatggcaaagagcccataaatcctgaccaatccaactctgaattttaaagcaaaagcgtgaaaaaaaagattccctccttacccccaacccactcttttttcccaccacccactctcctctgcctcagtaagtatctggaggaagaaaacaggtgaaagaagaagtaaaaaccatttagtattagtattagaatgaagtcaaactgtgccacacatggtgaatgaaaaaaaaaaaaaagaggctgtgttttgtcacacagggcagtcattcagcaccagagcacgtgatggtctgagactctcttaggagcagagctctgccgcaatggccatgtggggatccacacctggtctgaggggcaactgagtctgcgggagaagagcggccctatgcatggtgtagatgccctgataaagaacatctgtcctgtgaaagactcaatgagctgttatgttgtaaacaggaagcatttcacatccaaacgagaaaatcatgtaaacatgtgtcttttctgtagagcataataaatggatgaggtttttgcaaaaaaaaaaaaaaaaa

SEQ ID NO: 140 - DNA, 2840 bp, Homo sapiens
  Genbank Accession No. AF026692
cagcggccgctgaattctagggcgggttcgcgccccgaaggctgagagctggcgctgctcgtgccctgtgtgccagacggcggagctccgcggccggaccccgcggccccgctttgctgccgactggagtttgggggaagaaactctcctgcgccccagaagatttcttcctcggcgaagggacagcgaaagatgagggtggcaggaagagaaggcgctttctgtctgccggggtcgcagcgcgagagggcagtgccatgttcctctccatcctagtggcgctgtgcctgtggctgcacctggcgctgggcgtgcgcggcgcgccctgcgaggcggtgcgcatccctatgtgccggcacatgccctggaacatcacgcggatgcccaaccacctgcaccacagcacgcaggagaacgccatcctggccatcgagcagtacgaggagctggtggacgtgaactgcagcgccgtgctgcgcttcttcttctgtgccatgtacgcgcccatttgcaccctggagttcctgcacgaccctatcaagccgtgcaagtcggtgtgccaacgcgcgcgcgacgactgcgagcccctcatgaagatgtacaaccacagctggcccgaaagcctggcctgcgacgagctgcctgtctatgaccgtggcgtgtgcatttcgcctgaagccatcgtcacggacctcccggaggatgttaagtggatagacatcacaccagacatgatggtacaggaaaggcctcttgatgttgactgtaaacgcctaagccccgatcggtgcaagtgtaaaaaggtgaagccaactttggcaacgtatctcagcaaaaactacagctatgttattcatgccaaaataaaagctgtgcagaggagtggctgcaatgaggtcacaacggtggtggatgtaaaagagatcttcaagtcctcatcacccatccctcgaactcaagtcccgctcattacaaattcttcttgccagtgtccacacatcctgccccatcaagatgttctcatcatgtgttacgagtggcgttcaaggatgatgcttcttgaaaattgcttagttgaaaaatggagagatcagcttagtaaaagatccatacagtgggaagagaggctgcaggaacagcggagaacagttcaggacaagaagaaaacagccgggcgcaccagtcgtagtaatccccccaaaccaaagggaaagcctcctgctcccaaaccagccagtcccaagaagaacattaaaactaggagtgcccagaagagaacaaacccgaaaagagtgtgagctaactagtttccaaagcggagacttccgacttccttacaggatgaggctgggcattgcctgggacagcctatgtaaggccatgtgccccttgccctaacaactcactgcagtgctcttcatagacacatcttgcagcatttttcttaaggctatgcttcagtttttctttgtaagccatcacaagccatagtggtaggtttgccctttggtacagaaggtgagttaaagctggtggaaaaggcttattgcattgcattcagagtaacctgtgtgcatactctagaagagtagggaaaataatgcttgttacaattcgacctaatatgtgcattgtaaaataaatgccatatttcaaacaaaacacgtaatttttttacagtatgttttattaccttttgatatctgttgttgcaatgttagtgatgttttaaaatgtgatgaaaatataatgtttttaagaaggaacagtagtggaatgaatgttaaaagatctttatgtgtttatggtctgcagaaggatttttgtgatgaaaggggattttttgaaaaattagagaagtagcatatggaaaattataatgtgtttttttaccaatgacttcagtttctgtttttagctagaaacttaaaaacaaaaataataataaagaaaaataaataaaaaggagaggcagacaatgtctggattcctgttttttggttacctgatttccatgatcatgatgcttcttgtcaacaccctcttaagcagcaccagaaacagtgagtttgtctgtaccattaggagttaggtactaattagttggctaatgctcaagtattttatacccacaagagaggtatgtcactcatcttacttcccaggacatccaccctgagaataatttgacaagcttaaaaatggccttcatgtgagtgccaaattttgtttttcttcatttaaatattttctttgcctaaatacatgtgagaggagttaaatataaatgtacagagaggaaagttgagttccacctctgaaatgagaattacttgacagttgggatactttaatcagaaaaaaagaacttatttgcagcattttatcaacaaatttcataattgtggacaattggaggcatttattttaaaaaacaattttattggccttttgctaacacagtaagcatgtattttataaggcattcaataaatgcacaacgcccaaaggaaataaaatcctatctaatcctactctccactacacagaggtaatcactattagtattttggcatattattctccaggtgtttgcttatgcacttataaaatgatttgaacaaataaaactaggaacctgtatacatgtgtttcataacctgcctcctttgcttggccctttattgagataagttttcctgtcaagaaagcagaaaccatctcatttctaacagctgtgttatattccatagtatgcattactcaacaaactgttgtgctattggatacttaggtggtttcttcactgacaatactgaataaacatctcaccggaattc

SEQ ID NO: 141 - DNA, 1969 bp, Homo sapiens
  Genbank Accession No. E28892
  unsure (1)..(1969): n = a or c or g or t
cgcggagtccgggactggagctgcccgggcgggttcgcgccccgaaggctgagagctggcgctgctcgtgccctgtgtgccagacggcggagctccgcggccggaccccgcggccccgctttgctgccgactggagtttgggggaagaaactctcctgcgccccagaggatttcttcctcggcgaagggacagcgaaagatgagggtggcaggaagagaagggcgctttctgtctgccggggtcgcagcgcgaganggcagtgccatgttcctctccatcctagtggcgctgtgcctgtggctgtcacctggggctgggcgtgtcgcggcgcccctgacgaggtcggtgcgcatccctatgtgccggcacatgccctggaacatcacgcggatgcccaaccacctgcaccacagcacgcaggagaacgccatcctggccatcgagcagtacgaggagctggtggacgtgaactgcagcgccgtgctgcgcttcttcctctgtgccatgtacgcgcccatttgcaccctggagttcctgcacgaccctatcaagccgtgcaagtcggtgtgccaacgcgcgcgcgacgactgcgagcccctcatgaagatgtacaaccacagctggcccgaaagcctggcctgcgacgagctgcctgtctatgaccgtggcgtgtgcatctcgcctgaagccatcgtcacggacctcccggaggatgttaagtggatagacatcacaccagacatgatggtacaggaaaggcctcttgatgttgactgtaaacgcctaagccccgatcggtgcaagtgtaaaaaggtgaagccaactttggcaacatatctcagcaaaaactacagctatgttattcatgccaaaataaaagctgtgcagaggagtggctgcaatgaggtcacaacggtggtggatgtaaaagagatcttcaagtcctcatcacccatccctcgaactcaagtcccgctcattacaaattcttcttgccagtgtccacacatcctgccccatcaagatgttctcatcatgtgttacgagtggcgctcaaggatgatgcttcttgaaaattgcttagttgaaaaatggagagatcagcttagtaaaagatccatacagtgggaagagaggctgcaggaacagcggagaacagttcaggacaagaagaaaacagccgggcgcaccagtcgtagtaatccccccaaaccaaagggaaagactcctgctcccaaaccagccagtcccaagaagaacattaaaactaggggtcgacccacgcgtccgaagagaacaaacccgaaaagagtgtgagctaactagtttccaaagcggagacttccgacttccttacaggatgaggctgggcattgcctgggacagcctatgtaaggccatgtgccccttgccctaacaactcactgcagtgctcttcatagacacatcttgcagcatttttcttaaggctatgcttcagtttttctttgtaagccatcacaagccatagtggtaggtttgccctttggtacagaaggtgagttaaagctggtggaaaaggcttattgcattgcattcagagtaacctgtgtgcatactctagaagagtagggaaaataatgcttgttacaattcgacctaatatgtgcattgtaaaataaatgccatatttcaaacaaaacacgtaatttttttacagtatgtttattaccttttgatatctgttgttgcaatgttagtgatgtttaaaatgtgatcgaaaatataatgcttctaagaaggaacagtagtgggaatgaatgtctaaaagatctttatgtgtttatggtctgccagaaggatttttgtgatgaaaggggattttttgaaaaatctaggggaagtagccatatgggaaaattatnatgtgtcttttttacatggacttccagctccgttttttggctnggaaactctnaaaaccaaant

SEQ ID NO: 142 - DNA, 5228 bp, Homo sapiens
  Genbank Accession No. L19872
cacggcccagacccaggattctttatagacggcccaggctcctcctccgcccgggccgcctcacctgcgggcattgcgcgccgcctccgccggtgtagacggcacctgcgccgccttgctcgcgggtctccgccctcgcccaccctcactgcgccaggcccaggcagctcacctgtactggcgcgggctgcggaagctgcgtgacgcgaggcgttgaggcgcggcgcccacgccactgtcccgagaggacgcaggtggagcgggcgcgacttcgcgaacccggcgccggccgccgcagtggtcccagcctacaccgggttccggggacccggccgccagtgcccggggagtagccgccgccgtcggctgggcaccatgaacagcagcagcgccaacatcacctacgccagtcgcaagcggcggaagccggtgcagaaaacagtaaagccaatcccagctgaaggaatcaagtcaaatccttccaagcggcatagagaccgacttaatacagagttggaccgtttggctagcctgctgcctttcccacaagatgttattaataagttggacaaactttcagttcttaggctcagcgtcagttacctgagagccaagagcttctttgatgttgcattaaaatcctcccctactgaaagaaacggaggccaggataactgtagagcagcaaatttcagagaaggcctgaacttacaagaaggagaattcttattacaggctctgaatggctttgtattagttgtcactacagatgctttggtcttttatgcttcttctactatacaagattatctagggtttcagcagtctgatgtcatacatcagagtgtatatgaacttatccataccgaagaccgagctgaatttcagcgtcagctacactgggcattaaatccttctcagtgtacagagtctggacaaggaattgaagaagccactggtctcccccagacagtagtctgttataacccagaccagattcctccagaaaactctcctttaatggagaggtgcttcatatgtcgtctaaggtgtctgctggataattcatctggttttctggcaatgaatttccaagggaagttaaagtatcttcatggacagaaaaagaaagggaaagatggatcaatacttccacctcagttggctttgtttgcgatagctactccacttcagccaccatccatacttgaaatccggaccaaaaattttatctttagaaccaaacacaaactagacttcacacctattggttgtgatgccaaaggaagaattgttttaggatatactgaagcagagctgtgcacgagaggctcaggttatcagtttattcatgcagctgatatgctttattgtgccgagtcccatatccgaatgattaagactggagaaagtggcatgatagttttccggcttcttacaaaaaacaaccgatggacttgggtccagtctaatgcacgcctgctttataaaaatggaagaccagattatatcattgtaactcagagaccactaacagatgaggaaggaacagagcatttacgaaaacgaaatacgaagttgccttttatgtttaccactggagaagctgtgttgtatgaggcaaccaacccttttcctgccataatggatcccttaccactaaggactaaaaatggcactagtggaaaagactctgctaccacatccactctaagcaaggactctctcaatcctagttccctcctggctgccatgatgcaacaagatgagtctatttatctctatcctgcttcaagtacttcaagtactgcaccttttgaaaacaactttttcaacgaatctatgaatgaatgcagaaattggcaagataatactgcaccgatgggaaatgatactatcctgaaacatgagcaaattgaccagcctcaggatgtgaactcatttgctggaggtcacccagggctctttcaagatagtaaaaacagtgacttgtacagcataatgaaaaacctaggcattgattttgaagacatcagacacatgcagaatgaaaaatttttcagaaatgatttttctggtgaggttgacttcagagacattgacttaacggatgaaatcctgacgtatgtccaagattctttaagtaagtctcccttcataccttcagattatcaacagcaacagtccttggctctgaactcaagctgtatggtacaggaacacctacatctagaacagcaacagcaacatcaccaaaagcaagtagtagtggagccacagcaacagctgtgtcagaagatgaagcacatgcaagttaatggcatgtttgaaaattggaactctaaccaattcgtgcctttcaattgtccacagcaagacccacaacaatataatgtctttacagacttacatgggatcagtcaagagttcccctacaaatctgaaatggattctatgccttatacacagaactttatttcctgtaatcagcctgtattaccacaacattccaaatgtacagagctggactaccctatggggagttttgaaccatccccataccccactacttctagtttagaagattttgtcacttgtttacaacttcctgaaaaccaaaagcatggattaaatccacagtcagccataataactcctcagacatgttatgctggggccgtgtcgatgtatcagtgccagccagaacctcagcacacccacgtgggtcagatgcagtacaatccagtactgccaggccaacaggcatttttaaacaagtttcagaatggagttttaaatgaaacatatccagctgaattaaataacataaataacactcagactaccacacatcttcagccacttcatcatccgtcagaagccagaccttttcctgatttgacatccagtggattcctgtaattccaagcccaattttgaccctggtttttggattaaattagtttgtgaaggattatggaaaaataaaactgtcactgttggacgtcagcaagttcacatggaggcattgatgcatgctattcacaattattccaaaccaaattttaatttttgcttttagaaaagggagtttaaaaatggtatcaaaattacatatactacagtcaagatagaaagggtgctgccacggagtggtgaggtaccgtctacatttcacattattctgggcaccacaaaatatacaaaactttatcagggaaactaagattcttttaaattagaaaatattctctatttgaattatttctgtcacagtaaaaataaaatactttgagttttgagctactggattcttattagttccccaaatacaaagttagagaactaaactagtttttcctatcatgttaacctctgcttttatctcagatgttaaaataaatggtttggtgctttttataaaaagataatctcagtgctttcctccttcactgtttcatctaagtgcctcacatttttttctacctataacactctaggatgtatattttatataaagtattctttttcttttttaaattaatatctttctgcacacaaatattatttgtgtttcctaaatccaaccaattttcattaattcaggcatattttaactccactgcttacctactttcttcaggtaaaagggcaaataatgatcgaaaaaataattatttattacataatttagttgtttctagactataaatgttgctatgtgccttatgttgaaaaaatttaaaagtaaaatgtctttccaaattatttcttaattattataaaaatattaagacaatagcacttaaattcctcaacagtgttttcagaagaaataaatataccactctttacctttattgatatctccatgatgatagttgaatgttgcaatgtgaaaaatctgctgttaactgcaaccttgtttattaaattgcaagaagctttatttctagctttttaattaagcaaagcacccatttcaatgtgtataaattgtctttaaaaactgttttagacctataatccttgataatatattgtgttgactttataaatttcgcttcttagaacagtggaaactatgtgtttttctcatatttgaggagtgttaagattgcagatagcaaggtttggtgcaaagtattgtaatgagtgaattgaatggtgcattgtatagatataatgaacaaaattatttgtaagatatttgcagtttttcattttaaaaagtccataccttatatatgcacttaatttgttggggctttacatactttatcaatgtgtctttctaagaaatcaagtaatgaatccaactgcttaaagttggtattaataaaaagacaaccacatagttcgtttaccttcaaactttaggtttttttaatgatatactgatcttcattaccaataggcaaattaatcaccctaccaactttactgtcctaacatggactttcaaaaagaaaaaatgacaccatcttttattctttttttttttttttttttgagagagagtcttactctgccgcccaaactggagtgcagtggcacaatcttggctcactgcaacctctacctcctgggttcaagtgattctcttgcctcagcctcccgagttgctgggattgcgggcatggtggcgtgagcctgtagtcctagctactcgggaggctgaggcaggagaatagcctgaacctgggaatcggaggttgcagggccaagatcgccccactgcactccagcctggcaatagaccgagctccgtctccaaaaaaaaaaatacaatttttatttcttttactttttttagtaagttaatgtatataaaaatggcttcggacaaaatatctctgagttctgtgtattttcagtcaaaactttaaacctgtagaatcaatttaagtgttgaaaaaaatttgtctgaaacatttcataatttgtttccagcatgaggtatctaaggatttagaccagaggtctagattaatactctatttttacatttaaaccttttattataagtcttacataaaccatttttgttactctcttccacatgttactggataaattgtttagtggaaaataggctttttaatcatgaatatgatgacaatcagttatacagttataaaattaaaagtttgaaaagcaatattgtatatttttatctatataaaataactaaaatgtatctaagaataataaaatcacgttaaacc

SEQ ID NO: 143 - DNA, 896 bp, Homo sapiens
  Genbank Accession No. X71973
cggggaggcgcggaaagccgacgcgcgtccattggtcggctggacgaggggaggagccgctggctcccagccccgccgcgatgagcctcggccgcctttgccgcctactgaagccggcgctgctctgtggggctctggccgcgcctggcctggccgggaccatgtgcgcgtcccgggacgactggcgctgtgcgcgctccatgcacgagttttccgccaaggacatcgacgggcacatggttaacctggacaagtaccggggcttcgtgtgcatcgtcaccaacgtggcctcccagtgaggcaagaccgaagtaaactacactcagctcgtcgacctgcacgcccgatacgctgagtgtggtttgcggatcctggccttcccgtgtaaccagttcgggaagcaggagccagggagtaacgaagagatcaaagagttcgccgcgggctacaacgtcaaattcgatatgttcagcaagatctgcgtgaacggggacgacgcccacccgctgtggaagtggatgaagatccaacccaagggcaagggcatcctgggaaatgccatcaagtggaacttcaccaagttcctcatcgacaagaacggctgcgtggtgaagcgctacggacccatggaggagcccctggtgatagagaaggacctgccccactatttctagctccacaagtgtgtggccccgcccgagcccctgcccacgcccttggagccttccaccggcactcatgacggcctgcctgcaaacctgctggtggggcagacccgaaaatccagcgtgcaccccgccggaggaaggtcccatggcctgctgggcttggctcggcgcccccacccctggctaccttgtgggaataaacagacaaattagaaaaaaaaaaaaaaa

SEQ ID NO: 144 - DNA, 6135 bp, Homo sapiens
  Genbank Accession No. AF060972
  unsure (1)..(6135): n = a or c or g or t
agatcttaaaaaagaaatgaagccacaggacagcccctccccagtccttcctggagccaggggctgctctagaaagatatgtggcaacacagcttcctgcagggacactcaagaacttccgccctcacagggctggagccttgagaggtccccgagactccatttccccgttcgtgaaatggggacactctgggaaaagctgtgaagcccccagcacaaatctctcccagagcctggggccccgttctcagatccgaggtcgcgaccccgtgttttccccacttctgactttatcacaattggcaggaagtcaggaatgggatcaagtctctccgcggagctgtgggtgctgagctgtttttctggcaaccctgaaataaactcccatttcagtgcacatgtttgcaacaaacttaaggaaaacaacaccggcaaaattgcgaacagctgagccttcgcaagggcaagaacagagtcaccagtgtggccctgtcacccggcactgccagggcgggaggaaatgggggggtttcctgagaagtcagacaatgggagttgactccaagaactcagcctctaggggctgggcgggagcaaagccatgtgaacagacttatgcaagaccaggattcggccagccctgctcagggatccttgcttcactgcctctgccaccaaaccatccatgacgcctctgtgctgcatctggcaggcctgagtcgggggcagtggcgggggcaggctcatagcaccccccaagtcaacccggccctgagtctgtctctgaagaaatactcagtgcagggtcagaaaaggttaagaccttgaggacaacatacaaatcccaagcacctaggcggggtagagtggctcacacctgtaatcccagcactttgggaggccgaggcaggcggatcacctgaggtcgggagttcgagaccagcctgaccaacatggtgaaagcccgtatctactaaaaacacaaaaattagctgggcgtggtagcacatgcctgtaatcccagctactcaggagactgaggcaggagaatcacttgaacccggaaagcggaggttgcagtgagctgcgatggagccactgcactccagcctgggtgacagaccaagactcctcaaaaaaaaaaaaaaaaatccaaacccctgcctgtacaggggtcaaagtccaatcacggtgactcagttcccaagtatgagatgagtgtttctgttgccacatgtccaagccacgaagtgaaaaacagagttggaagccaagatgtggggcagtatgggctcgggtgtgcccataccttgtaatgttagaagtgtaagaaaaccctccagacttgtgtttattttctgagcacataccgcgcgtccctgcgtgggcagctgcccctgggggtgggagcccaggaaactccaggttctcagttaagtggtaactgtcttgatgactctcaggtctcagtgcccacattatacaagcggctcagcaaccagacccaggatggggagtcactgaccccctgcgcccatggcaggggtgagggtagggacacccccataagatggagctgtgatgagaagcaaacccaactcagtttggtttcatttacattaaaaaggcaaatcccttggccggatgcggtggctcacacctgtaatcccagcactctgggaggcctaggcgggcagatcacctgaggtcaggagttcgagatcagcctggccaacatggtgaaaccccgtctctactaaaaatacaaaaaaattagctgggtgtggtggctcgctcgtgtaatcccagctactcaggaggctgagtcaggagaatcgcttgaacccgggggctgggtggaggttgcagtgagctgagatagcgccactgcactccagcctgggcaaaagagcaaaaaaactgtgtctcggaaaaaaaaaaaaaaaaaaggcaaatcccggccgagcctttggctcacgcatgtgatcccagcacttttgggaagctgaggctggaggatcacttgaggtcagaagtttgagaccagcctaggcaacatagcgagacccccatgtctacaaaacaataattagccaggaatggtggatgagcctgttgtcccagctactcgggaagcagagacgggaggttcgcttgagcctgggaggtcgaggctgcagtgtgccctgatcgtgccactgcacgttagcctgggcaacacagcaagaccccgtgtcttaaaaaaaaaaaggtaaataagagttggggacacttttctgcgagttggagaaaccaaaccccctcgacgagtcttaagtagtattctcaggttgtctggcctgcggccgcgctgctgtcaaccagccggataactgcgctgcctcccgacgcgccgccagccaggccacggcctcctagacacaagcgagcatgcgcagtcgccaacaacaagtccgcacgtccggtcccgcccccccttccccgccttcttcccactccggcctcccattggctgacgtcggcgcgagcgctcaacaccgacgcgtctgaccaatgagcgctctggagggcgtggccgtgggaaaggaggcgcggaaagccgacgcgcgtccattggtcggctggacgaggggaggagccgctggctcccagccccgccgcgatgagcctcggccgcctttgccgcctactgaagccggcgctgctctgtggggctctggccgcgcctggcctggccgggaccatggtgagctagcgccgcggccgttgccggcccggtgaccgttggggcgggcgcgcgatccctgcctccgctcgccggcgtggggaaccctcaggctccagtgaccttggtggggggcgtctgggggctccccctccccacccccggccgggcacggacgcgggtgaccgtactgcgacgcgctccgcggccctccagaccgttgtaggcgcgcgggctggggtcggggaaggggaaggggttgttccacgcgcgcgggtcgtggtcggggaaggggccgtccaggccgttgcaggcgcgcgtgccggggccggcgtccggggtccaagcttgcagggggcgggggtccgggacggctggggcggagctggaccgttgagggccacggcggggcgtctccgggccgagcggggctgctgcgcccgagcggttgggggcgcggagggctggaaatcccggatcacgcgcccccgggcgccgccccgcccccgcaccttggcctagcgcggtggcgtcacagtcgcgcagtcctgactacggcctccgggccctttgtccccgctagcggcgctcggggtgggggagccaggaggggcgggagacgggcgggtatgggccgcgcgggcgcaggctcccccgggcgccgcaggcagcggtgccagagccggggcaggcggcggccgcgagcccctcggcggcggaaggccccagcgtgcaggcgcaggagggcgcggcgccggcggaagaagccctgtccccgcagcttgcgaccggagatccacgaatgtcccaagtcccaggacccggtgcgcgcggggcccccacaccggctaatgtggcacattttggggttggaaccctctcccggcctccgggtctccggtaaaaccggaccagaagtacaagggggcgtgtgcgtttaaggaggaggagcgttcaggtcttcagggccgcagggcctcggtgtccccgccaccgacccgctcccgatcccttcctgcctcagggtcccgggctcagcctcccgtccacgctccctgctcagcttcctttgccttgcagtgcgcgtcccgggacgactggcgctgtgcgcgctccatgcacgagttttccgccaaggacatcgacgggcacatggttaacctggacaagtaccggtgggcgctcgcctggggtggggcgcggggtcgggccctgggagggggccgtgttcttctgcgctgacgccgccgatcctcgcaggggcttcgtgtgcatcgtcaccaacgtggcctcccagtgaggcaagaccgaagtaaactacactcagctcgtcgacctgcacgcccgatacgctgagtgtggtttgcggatcctggccttcccgtgtaaccagttcgggaagcaggtgggctgctgcgtcaccggggcccgcagaggcgggtgggtgggggtcggggtgggctccagcctggagagggcctgggagtgtgcagggggcccggactgagggggtgccagcccccgactcactcacacaccttggccgccacaggagccagggagtaacgaagagatcaaagagttcgccgcgggctacaacgtcaaattcgatatgttcagcaagatctgcgtgaacggggacgacgcccacccgctgtggaagtggatgaagatccaacccaagggcaagggcatcctgggaaagtgcgtgacctctggggacagtacggctgctggggtgggggtgggggggctgctgggatgctcacacctccctggggcagaatggctcatggctcggggggcggttgccgggwaggtgctgggactctcacatcgcgtggcctcctgggggtaagatggctcagggggacatagagggctgtggaggcaggcagggatgcccacacctttgtaccctcctggggacaggatggctcgggggcctgtggggggctgttgggactctcacactgcatggcctcctggggtaagatggctctgggggggcttgggggcactgtggctgtggaggcagccggggaagctcacacccttgtggcctcctggagacaggacagcttggggactgtggggggctgctggggacgctcacgtccatgtgcttcttttccagtgccatcaagtggaacttcaccaaggtaagggggctgtggggggtaggggaccagcttcccctggccacagccgtggcccagatgggcagcggacaggaagggcagcctcagccccttgcaggggtggccccacagtttggacaccgtctctccacagttcctcatcgacaagaacggctgcgtggtgaagcgctacggacccatggaggagcccctggtgggtcctctctagggaccccgcttgaggctcgggggcttgggaggtagctgccctaacccagctttcctccccgacaggtgatagagaaggacctgccccactatttctagctccacaagtgtgtggccccgcccgagcccctgcccacgccctcggagccttccaccggcactcatgacggcctgcctgcaaacctgctggtggggcagacccgaaaatccagcgtgcaccccgccggaggaaggtcccatggcctgctgggcttggctcggcgcccccacccctggctaccttgtgggaataaacagacaaattagcctgctggatctttctgcgtaggggcttggggggcccttttgccaggggcccctccatgtcagggctagttgccgtcagctgccaggctgggggtgccatggaggtggcgtgttgttgccccctcttcctccaggctcggggggctgtgctggctgcagtgctggggtgcagtgagatctgggcccgttggacacccagccctggctcttaatccgtgcagccccacctgctgtgcacaggcagggcctggtgtagggccgagtcttggaggagataattctaagtggctgtgcttcctggccccgggccttaactgttaggaggtggctactggggcctcccctggccaggaagcagaagtgcagaggcccgaggaacagcgtggccctggtgctggggatgggttgggcacccacaccggcccttggggcctcacctggctggggggtgtgggggtggctgggtggttactgtttgcacagagtccctccgtgagggctggggatggacaggccaggagggctggtagagcagtaccaagccaccgttcatggggcccgggggctgtctggacacggcctggctgcccacctgcacagctagagggactgcagcctgccagggtggctgatccagctgcccccacctgggggtctgtggnatggacggtccatggcacctgccccagacactgggttgagaagtctgtctctccagccctcgtcccctctcat

SEQ ID NO: 145 - DNA, 1050 bp, Homo sapiens
  Genbank Accession No. V00510
ttctttttatcattacatcaaattgttttcccaggcttgcgtaatggaatgtgaaggtaaactgccttctctgaaaatttgggaaacctgcaaggagctcctgcagctgtccaaaccagagcttcctcaagatggcaccagcaccctcagagaaaatagcaaaccggaagaaagccatttgctagccaaaaggtatgggggcttcatgaaaaggtatggaggcttcatgaagaaaatggatgagctttatcccatggagccagaagaagaggccaatggaagtgagatcctcgccaagcggtatgggggcttcatgaagaaggatgcagaggaggacgactcgctggccaattcctcagacctgctaaaagagcttctggaaacaggggacaaccgagagcgtagccaccaccaggatggcagtgataatgaggaagaagtgagcaagagatatgggggcttcatgagaggcttaaagagaagcccccaactggaagatgaagccaaagagctgcagaagcgatatgggggcttcatgagaagagtaggtcgcccagagtggtggatggactaccagaaacggtatggaggtttcctgaagcgctttgccgaggctctgccctccgacgaagaaggcgaaagttactccaaagaagttcctgaaatggaaaaaagatacggaggatttatgagattttaatatcttttcccactagtggccccaggccccagcaagcctccctccatcctccagtgggaaactgttgatggtgttttattgtcatgtgttgcttgccttgtatagttgacttcattgtctggataactatacaacctgaaaactgtcatttcaggttctgtgctctttttggagtctttaagctcagtattagtctattgcagctatctcgttttcatgctaaaatagtttttgttatcttgtctcttatttttgacaaacatcaataaatgcttacttgtatatagagataataaacctattaccccaagtgcataatatccttgtaagtctctttttctccaaggctc

SEQ ID NO: 146 - DNA, 1056 bp, Homo sapiens
  Genbank Accession No. J00123
ttctttttatcattacatcaaattgttttcccaggcttgcgtaatggaatgtgaaggtaaactgccttctctgaaaatttgggaaacctgcaaggagctcctgcagctgtccaaaccagagcttcctcaagatggcaccagcaccctcagagaaaatagcaaaccggaagaaagccatttgctagccaaaaggtatgggggcttcatgaaaaggtatggaggcttcatgaagaaaatggatgagctttatcccatggagccagaagaagaggccaatggaagtgagatcctcgccaagcggtatgggggcttcatgaagaaggatgcagaggaggacgactcgctggccaattcctcagacctgctaaaagagcttctggaaacaggggacaaccgagagcgtagccaccaccaggatggcagtgataatgaggaagaagtgagcaagagatatgggggcttcatgagaggcttaaagagaagcccccaactggaagatgaagccaaagagctgcagaagcgatatgggggcttcatgagaagagtaggtcgcccagagtggtggatggactaccagaaacggtatggaggtttcctgaagcgctttgccgaggctctgccctccgacgaagaaggcgaaagttactccaaagaagttcctgaaatggaaaaaagatacggaggatttatgagattttaatatcttttcccactagtggcccccaggccccagcaagcctccctccatcctccagtgggaaactgttgatggtgttttattgtcatgtgttgcttgccttgtatagttgacttcattgtctggataactatacaacctgaaaactgtcatttcaggttctgtgctctttttggagtctttaagctcagtattagtctattgcagctatctcgtttttcatgctaaaaatagttttttgttatcttgtctcttattttttgacaaacatccaataaatgcttacttgtatatagagataataaacctattaccccaagtgcataatatccttgtaagtctctttttctccaaggctc

SEQ ID NO: 147 - DNA, 4888 bp, Homo sapiens
  Genbank Accession No. K00489
aagcttaaatactcattaagagcttactaaatacgtgccttcaagattttgttgcactaataaaatgctttctttcattgtgaaaataatatatgtgtatttaacatcacttaatataccagtatatttttaataataccaagaaagacttcagagggctgtaaaaactcctgaaatgctaagaaatatcatgcatgttttgtaaatgttcacatattagtactctctttatcatacccaagtgatgtgttaaatagaaaaaaacttaagatcattcgaatgtatagacttacaatgattttatatttaatatttatatagaaaaaggaaagaatgtatgctgatgattcctattttaccaaacaccatgatttccattgaaaaatactttttctgtacaacagtgactaaatgtgaagaaaataaacatgaataatttgtgcacttgcatttgtataattttatatctgatctcatcattatagacattttgttcaaaataataaagtctgttgtatccagcaaagaaaaaaaggaaaaaaacaaaagatctgtacttacaacaaattaacaaattaataagaatgcaaataattcagtcagatttaaattgagtttttaggatgtgtttataaactttttttaaattgttgtttttctttgaagattgaaagtatttgcaggaatactcgataccattttaggtaaaatattaacacaagaaagcaaatgacccttaggttattaatattgattttatctctaagacaagaagataaaaggaattttgaggaaatatccctgattaggtaaataaaaatttctccttttttggttagaaaaatctcaaacaaaattatatcagaagtggaaaattatccagtgaaattagattgtgaaagcagtcaatctaagttaaaactgcatggaaaattttttttttaaattctttaaaatttctatgggtttaaaatccaaaggcagattcctaactggattcagtgaacccctccactttcacctttccaaattttatttgtttcatttgcatgctcagccttatgaaaagtcgtgataagaaattggagatgaccttattataataaggaagttatgatgtcaaagcaagcatattttggtccacaaaagttcatttgcttaatgaaatcacagaagcttctttttatcattacatcaaattgttttcccaggcttgcgtaatggaatgtgaaggtaaactgccttctctgaaaatttgggaaacctgcaaggagctcctgcagctgtccaaaccagagcttcctcaagatggcaccagcaccctcagagaaaatagcaaaccggaagaaagccatttgctagccaaaacgtatgggggcttcatgaaaaggtatggaggcttcatgaagaaaatggatgagctttatcccatggagccagaagaagaggccaatggaagtgagatcctcgccaagcggtatgggggcttcatgaagaaggatgcagaggaggacgactcgctggccaattcctcagacctgctaaaagagcttctggaaacaggggacaaccgagagcgtagccaccaccaggatggcagtgataatgaggaagaagtgagcaagagatatgggggcttcatgagaggcttaaagagaagcccccaactggaagatgaagccaaagagctgcagaagcgatatgggggcttcatgagaagagtaggtcgcccagagtggtggatggactaccagaaacggtatggaggtttcctgaagcgctttgccgaggctctgccctccgacgaagaaggcgaaagttactccaaagaagttcctgaaatggaaaaaagatacggaggatttatgagattttaatatcttttcccactagtggccccaggccccagcaagcctccctccatcctccagtgggaaactgttgatggtgttttattgtcatgtgttgcttgccttgtatagttgacttcattgtctggataactatacaacctgaaaaactgtcatttcaggttctgtgctctttttggagtctttaagctcagtattagtctattgcagctatctcgttttcatgctaaaatagtttttgttatcttgtctcttatttttgacaaacatcaataaatgcttacttgtatatagagataataaacctattaccccaagtgcataatatccttgtaagtatatttttctccaaggctctcatttacctttgggtttccgcatcaatcctagactcagggacagtagaaccatctgcttttgacataattttgacatcataatcattgtatttcttctccttcagccaaggctcaaaaacattttttatttaattcctcacagcatgaatcttagattagtaaacacgtggagcaaataaaatgtatttcactctcatttatccaaatcagatacatgaagaaaaaccaaagcctaataaaggagccagctatgcccccattaaacacacacacacacacacacacacacatacttgcatttacatcagatgtgtatgtctcttttcttcagtaaagtattttagaagttagtaagaaattaaagataatttagtccaattttacaaatgaagaaagggaagccaagaaaggttgtgtagttggcccaaagttgcccagcagttgaaggacaaaaataggattaaaaccccaaactttttgtgcccagtcaatatccttttcactgcggttccttatctcctatccacgtcactagtaagaattgtaagaacggtggaactacatcttagtcaccattgtacacctctacactatgactgtagcagattctccaatatcggatgaatggatatatgaatgatgaataaattaatttggtgaccagataatgaggaaagatattgtgagtgttttgtaaggtaaatccccaaaacacaaggtgcttatgactacttcatattaatgagacaatgctcagatataagaaatgtaacttttcatttttcttattattattattatactttaagttttagggtacatgtgcacagcatgcaggtttgttacgtatgtaaacatgtgccattaactcgtcattctggtttctcttcagatcgtgcaaatctttcgcctttaacttttcatttttctaactgaaacaacatacggcttaacccctactcactaaatcatttttccaggacccccaccaaccctttctcttgtgtttctcaaaacattggaatttagcaactctggaaagtgggggacgagtctctggtctgcagtctaccaagctgctgccgagatgctcactgtgcaagcctgtgtgccccatctgataaggcagctgcactgtgctcggcagtttgttctctctgtaccagcgccagggctcacaggacatccacatgatcatgctgttaggagacccatctcctggaattagtgcaaggaatcacagggccccacactcacagagccccaactccatcaatcttcctgatccttggtaaactaattttttcttccagcaaagcccgggagaaaaaagataatacaataattattgataagataatgccattattatctcacaatagtccaatatgtatacttacatatctcatacaatgtgtttgagaaaataacaagttcaccatcagacaaatacatttttcaaagcaagcgcagtttcatgcgcgtcggtgtgaagagaccaccaaacaggctttgtgtgagcaataaagcttttaatcatctgggtgcaggcgggctgagtccgaaaagagagtcagcaaagggagataagggtgaggccattttataagatttgggtaggtaaaggaaaattacagtcaaaggggggttgttctctggcgggcaggtgtgggggtcacaaggtgctcagtaggggagcttttgagccaggacgagccaggagaaggaatttcacaagataatgtcatcacttaaggcaagaacaggccattttcacttcttttgtggtagaatgtcatcagttaaagcaggaactggccatctggatgtgtacgtgcacgtcacacgggatatgatggcttagcttgggctcagaggcctgacacacagttctttttttttttttttagagatgagggctcacttggttgcccaggctggagtgcagtcgctagctcacttcagcctcggcttcctggcctcaagcaatcctcccccctcagcctcacaaaatgctgagattacaggcgtgacaccgcgcctggccaagcacagtttttttaatctaggaggctttcttctcttttggggaagcagtgtagactgggctaaggcactcgtggtagttaagagttgtctgcggctccatttcacccccaccccccaacacttacccccccccagccccgccggtcgcctccgccaagggccgcacgatgctcgaggggtgggacagcgtcacacacttgcagttcctcaattctctctcatgtcatggtgtagaatcgggaacctagaggatgcgttcaaaattgcctagggaaggaaggaacagacgagaggggtcgggacacgaggaaaggggaaagggacgatcggggatgactcctgtggaggcgccggagcgatgccaaccaagctgtgcgcccgccccgggcattacaggacgcaggaccccctcctccagaggtcctcagcagtaagtacgggcggtcgtccacaaaacatgactcgagggggttgcgtaggcctcactcactctccaaatttctcctgagctgtctggccttcaatttgaaattgcagcattagaagtttgctttccaactcttaagggctttgatgtttgatgtttttaagaatttcctatttgaattc

SEQ ID NO: 148 - DNA, 2323 bp, Homo sapiens
  Genbank Accession No. U13660
tcaagaacgagttattttcagctgctgactggagacggtgcacgtctggatacgagagcatttccactatgggactggatacaaacacacacccggcagacttcaagagtttcagactgaggagaaaacctttccttctgctgctactgctgctgccgctgcttttgaaagtccactcctttcatggtttttcctgccaaaccagaggcaccttcgctgctgccgctgttctctttggtgtcattcagcggctggccagaggatgagactccccaaactcctcactttcttgctttggtacctggcttggctggacctggaattcatctgcactgtgttgggtgcccctgacttgggccagagaccccaggggtccaggccaggattggccaaagcagaggccaaggagaggccccccctggcccggaacgtcttcaggccagggggtcacagctatggtgggggggccaccaatgccaatgccagggcaaagggaggcaccgggcagacaggaggcctgacacagcccaagaaggatgaacccaaaaagctgccccccagaccgggcggccctgaacccaagccaggacaccctccccaaacaaggcaggctacagcccggactgtgaccccaaaaggacagcttcccggaggcaaggcacccccaaaagcaggatctgtccccagctccttcctgctgaagaaggccagggagcccgggcccccacgagagcccaaggagccgtttcgcccaccccccatcacaccccacgagtacatgctctcgctgtacaggacgctgtccgatgctgacagaaagggaggcaacagcagcgtgaagttggaggctggcctggccaacaccatcaccagctttattgacaaagggcaagatgaccgaggtcccgtggtcaggaagcagaggtacgtgtttgacattagtgccctggagaaggatgggctgctgggggccgagctgcggatcttgcggaagaagccctcggacacggccaagccagcggtcccccggagccggcgggctgcccagctgaagctgtccagctgccccagcggccggcagccggccgccttgctggatgtgcgctccgtgccaggcctggacggatctggctgggaggtgttcgacatctggaagctcttccgaaactttaagaactcggcccagctgtgcctggagctggaggcctgggaacggggcaggaccgtggacctccgtggcctgggcttcgaccgcgccgcccggcaggtccacgagaaggccctgttcctggtgtttggccgcaccaagaaacgggacctgttctttaatgagattaaggcccgctctggccaggacgataagaccgtgtatgagtacctgttcagccagcggcgaaaacggcgggccccatcggccactcgccagggcaagcgacccagcaagaaccttaaggctcgctgcagtcggaaggcactgcatgtcaacttcaaggacatgggctgggacgactggatcatcgcaccccttgagtacgaggctttccactgcgaggggctgtgcgagttcccattgcgctcccacctggagcccacgaatcatgcagtcatccagaccctgatgaactccatggaccccgagtccacaccacccacctgctgtgtgcccacgcggctgagtcccatcagcatcctcttcattgactctgccaacaacgtggtgtataagcagtatgaggacatggtcgtggagtcgtgtggctgcaggtagcagcactggccctctgtcttcctgggtggcacatcccaagagccccttcctgcactcctggaatcacagaggggtcaggaagctgtggcaggagcatctacacagcttggtgaagggattcaataagcttgctcgctctctgagtgtgacttgggctaaaggcccccttttatccacaagttcccctggctgaggattgctgcccgtctgctgatgtgaccagtggcaggcacaggtccagggagacagactctgaatgggactgagtcccaggaaacagtgctttccgatgagactcagcccaccatttctcctcacctgggccttctcagcctctggactctcctaagcacctctcaggagagccacaggtgccactgcctcctcaaatcacatttgtgcctggtgacttcctgtccctgggacagttgagaagctgactgggcaagagtgggagagaagaggagagggcttggatagagttgaggagtgtgaggctgttagactgttagatttaaatgtatattgatgagataaaaagcaaaactgtgccta

SEQ ID NO: 149 - DNA, 2703 bp, Homo sapiens
  Genbank Accession No. X80915
ccatggcctcgaaagggcagcggtgatttttttcacataaatatatcgcacttaaatgagtttagacagcatgacatcagagagtaattaaattggtttgggttggaattccgtttccaattcctgagttcaggtttgtaaaagatttttctgagcacctgcaggcctgtgagtgtgtgtgtgtgtgtgtgtgtgtgtgtgtgtgtgtgaagtattttcactggaaaggattcaaaactagggggaaaaaaaaactggagcacacaggcagcattacgccattcttccttcttggaaaaatccctcagccttatacaagcctccttcaagccctcagtcagttgtgcaggagaaagggggcggttggctttctcctttcaagaacgagttattttcagctgctgactggagacggtgcacgtctggatacgagagcatttccactatgggactggatacaaacacacacccggcagacttcaagagtctcagactgaggagaaagcctttccttctgctgctactgctgctgccgctgcttttgaaagtccactcctttcatggtttttcctgccaaaccagaggcacctttgctgctgccgctgttctctttggtgtcattcagcggctggccagaggatgagactccccaaactcctcactttcttgctttggtacctggcttggctggacctggaattcatctgcactgtgttgggtgcccctgacttgggccagagaccccaggggaccaggccaggattggccaaagcagaggccaaggagaggccccccctggcccggaacgtcttcaggccagggggtcacagctatggtgggggggccaccaatgccaatgccagggcaaagggaggcaccgggcagacaggaggcctgacacagcccaagaaggatgaacccaaaaagctgccccccagaccgggcggccctgaacccaagccaggacaccctccccaaacaaggcaggctacagcccggactgtgaccccaaaaggacagcttcccggaggcaaggcacccccaaaagcaggatctgtccccagctccttcctgctgaagaaggccagggagcccgggcccccacgagagcccaaggagccgtttcgcccaccccccatcacaccccacgagtacatgctctcgctgtacaggacgctgtccgatgctgacagaaagggaggcaacagcagcgtgaagttggaggctggcctggccaacaccatcaccagctttattgacaaagggcaagatgaccgaggtcccgtggtcaggaagcagaggtacgtgtttgacattagtgccctggagaaggatgggctgctgggggccgagctgcggatcttgcggaagaagccctcggacacggccaagccagcggcccccggaggcgggcgggctgcccagctgaagctgtccagctgccccagcggccggcagccggcctccttgctggatgtgcgctccgtgccaggcctggacggatctggctgggaggtgttcgacatctggaagctcttccgaaactttaagaactcggcccagctgtgcctggagctggaggcctgggaacggggcagggccgtggacctccgtggcctgggcttcgaccgcgccgcccggcaggtccacgagaaggccctgttcctggtgtttggccgcaccaagaaacgggacctgttctttaatgagattaaggcccgctctggccaggacgataagaccgtgtatgagtacctgttcagccagcggcgaaaacggcgggccccactggccactcgccagggcaagcgacccagcaagaaccttaaggctcgctgcagtcggaaggcactgcatgtcaacttcaaggacatgggctgggacgactggatcatcgcaccccttgagtacgaggctttccactgcgaggggctgtgcgagttcccattgcgctcccacctggagcccacgaatcatgcagtcatccagaccctgatgaactccatggaccccgagtccacaccacccacctgctgtgtgcccacgcggctgagtcccatcagcatcctcttcattgactctgccaacaacgtggtgtataagcagtatgaggacatggtcgtggagtcgtgtggctgcaggtagcagcactggccctctgtcttcctgggtggcacatcccaagagccccttcctgcactcctggaatcacagaggggtcaggaagctgtggcaggagcatctacacagcttgggtgaaaggggattccaataagcttgctcgctctctgagtgtgacttgggctaaaggcccccttttatccacaagttcccctggctgaggattgctgcccgtctgctgatgtgaccagtggcaggcacaggtccagggagacagactctgaatgggactgagtcccaggaaacagtgctttccgatgagactcagcccaccatttctcctcacctgggccttctcagcctctggactctcctaagcacctctcaggagagccacaggtgccactgcctcctcaaatcacatttgtgcctggtgacttcctgtccctgggacagttgagaagctgactgggcaagagtgggagagaagaggagagggcttggatagagttgaggagtgtgaggctgttagactgttagatttaaatgtatattgatgagataaaaagcaaaactgtgcct
